United States Patent Application Publication US 2007/0054278 A1 - sequence listing, part 86

SEQ ID NO: 96730 - DNA, 45415 bp, Homo sapiens
agtgaggaaaaagaaaggaagctaagaaaccgatttcatttgccaccaaactcaataagccacctcttcttgaggcatgtgttggtggttaccagtggggactggaacaagttgagagctgaacccactggggctgcgaggatgtgggtgaggacccagcgtggcaagagttccaggcttcgacctccagctgcacagcttggtgatggccaagggtgcggctgcatttggaggcttctgtaaagaggcaggggtgccaccaaccagctcccttgatgcccctgccgagaaatgctaactggaaactcatggctggattgtctgcctcatcttgggttaacaaaagggtccctattgcttcaaccctggtcagttcagttcaaatctattgagcctccttatgcaccagacattttgctgggctctgcacatccagtagaggactcctggtttatgactctgtaagaagctagaagtggccactccatcctaaaagtagaaagctgaacaaactgaaaaatcaactcatcatagggaaaactgctgcccccaaaattggaaggaccaacaaaaagttgaaaacagagaatcacaacttactagagcagaaacacaggagcagaaaccataatgagaacccatgccagggtagggaaacctgaactgtaatggatgaatggctggaggcttcgtgtggacacatctgagggttaaacactccaggggactcagtcataagggcccccaacactgtttggggttttacctccaggagcttgaccaggttctcacagagaagatgagagaaaaattcccttatgcttcctgtaggttgggggaggaaagttgccattttaaactatgctagaacattctattttccctaaccaggcctgcgctcaagtggaattgttttaccagaccctaacctgttggggtttcattggaacttaactgacctgggccccggatgggaaatactcaacttcagtccactttagccatcctgtcccaccaaagattaggggactgagaagctcttgtgaggtcacagttcagaaacacaggctcagcaaaagactgacatctaataataggacgataggagactccccctcctcccatacattaccgttgccttaataagggcctatttactgcagtttgttttgcccgctacatcatgtgcagctagcaagaaaatagtacaagccatcctcaaaggcaaataaacaaacaaactcagcttgaggaaatagaccaaatatcagaactggagttaaatatggcaggaatattggagttatcaaactggtaatttaaaacaattatgatgattatgctgagggctgtagtggataaagtggacagtatgcaaaaacagacaggcaacgtgagcagagagatggaaatcctgagaaagcaccaaaaaggaaatgctagagattaaaaaaaaatgccatacgaggaatgaagcgtgactctgacaggcttattagcagactggacgctggaaaagtagatgttctcaagctggggaaagaatccctgtgcttgaaggttattcaacagaaaccctcaaagctgtaaagcaaacagaaaaacagactgagttaaaaaaaccggaaaagaatattccaaactgtggcacaactgcaaaaggtgtaacgtatatgtaatacccataccagaaggagaagaaagagtgaaagaaatcattatataaaaagacatctgcactagggtgtttatcacagcactattcacagtagcaaagatatggaatcaaccaaagtgttcatcaacagaggactggataaagaaaaatgtggtgtatatatgtaacatatataatgtatatgtataaacattatatacatgtatatatgttatacgtatatacattgtatgtataatgactgatatgtatatgactgatatgtataatgactatatgtatgatgactgaaggccattagcctaagtgaaataactcaggaacagaaagtcaaatatcaaatattcttgtaactgggagttaaacaatgggtgtgcatggacgtacagaatggaataaaggacactgaagactaaaagaggtgggaagaagggaggagcataagggttgaaaaaccatctattaaatacaatgttcactatttgggtgatgggtacactaaaagcccacacttcaccattatgcaatatatgcttgtaagaaaatgtgcttgtacccccataatatataaaagtagaaaatatatatagaaaacaaaagaaacagaagatatttgaaaaaataatgatgggaatttcccaaaattaatgtcagataccaaaccacaggtccaaaaaactcagagaacaccaagcaggataaattagaacacacacacacacacacacacacacacacacaaacacacacacacacaccctttacctaggcatattattttcaaactacagaaaataaaaataaagtcccaaaagaagccagaggaaacagacacattaactatcaaggagcaaaggtaagaattccatattacttctcagaaacaatacaagcagggagagagtagagtaaaatatttaaagagttgaggaaaaacaaacaaacaaaatgccaacctaaaattctataccttgtgaaattatctttgaaaactgaaaaagaaaaaaaatgctttcttcaacaaacaaaaattgaagaaatttgttgccagtagaccttccttacaaaaaaagtcaaaagaagttccttagagagaagaaaataatatgtcagaaactcagatctacataagaaaggaagaacattgaggaagaaataattgaaggtaaaataaatactttttttattcttacctgatttaacagaaaacaatttgttcaaaatcatcacatcaacgatgaattcaattacatgtgcttatgtatatgtcttatatgtattttatacttaacatatgcgtgtgtatgaatgaaatcaataacatagatgaatcaagagacaagagggaggaactgggtgacatttgaaaccagacttggattagttgtaaatgtatattgcaaactttaggatagccactaaaaaaagtgaaaaaggaattttaactgataagaaaggggaaaaaaaaagcattatacaaaatactcaattcaaaaccatgggccaggcatggtggctcatgcctataatcccagcacttcgggaggccaagaggggtggatcatgaggtcgggagtttaagaccagcctgagcaacatggcaaaaccccatctctacaaaaaatacaaaaattagccaggcatggtggtgcgtgcctgtaatcccagctactcaggaggctgaggcaggagaatcacttgaacctgggagacggaggttgcagtgagccgagattgcaccactgcacagcctgggcaacagagcaagactccgcaaaaacaaacaaacaaacaaataaaaaacatgaaaggcagaaagagtgaaagacaaaaataggaatgcagctgggtgtagtggctcacacctgtaaacctagcactttgggaagccaaaccaggcaaatcacttgaggcctgaagtttgagaccagtctggccaacataggaaagcccttttttctctaaaagaaaaaagagaaaaagaaaaaaaaaaagcaatgcaggacaaggaagggcaataaatagaaaatagtaacaaataagatagatactaatctaactatataaacaatcactttgaatataagtgctttatatgcaccaatgaaaacacagagattgtcagagtggataacagaacagtagccaactatatatcatctacagaggtgaagaaaacagggtcccttcccttggaaacctgacatcagaaaatgtttccaagggttcccctttttccaatagtgtgtgctatagagtgacggtggttctctctctgcctctgtcctttaggcacccacaccctgaggaactgcaggcatcacactttagcagtgatctagtgtccagagtcagagacccagagaaattaaaaatctcattaaaaacaagcaaacaaacaagtattctccccttgtaaatgttctcgttattattgtgtcctaacagtaactgtaggatttactctttgctgttggcttggccttcagggtaatttatcttgcatcgtctcatagattcaatcattatccttgaaacaataatgaagtgggagttaggagaccccaaagatgcttctctgtataggagtgaaaaccctggtggcagcagcaacactggtttccttgctgttccttgatgaagccaagcccactcccagccttctgcatttgtttttgttttacactctgcctggaatgatcttcccccccggcacaactgtgtgtcacttaacaacaggaatccacattctgagaactgtgtcatcaggcaattttgttgtgtgactattgtagggtgtacttacacaaacctagattttatagcctactacacacccaggctatatggtgtagccattgctcttagactataaacctgtatagcaggttagtgtagtgaatgttgtaggcaattgtaacacaagagtatttgtgaatctaaacgcagaaaaggcacagtaattggatatgcagtctgctgttgactgaaacatagtatgtggcgcatgactgtgtacacatggatagctctgaaggaaggaagagtttccaaaaagaggcaaccacagctcatttgagtgaagcctgttgtgacacagcatgggttgaaagtccagacactcaactcatcatcttaggctctgtgcatttgctaaacaatctgactgcattgcatcatctcagatgcctcacaatctctggtgaagccatatgcttcttcttgggtgtcgggtcacccctttatctctgtatccatgtatactgcaaattccttctttactcgccagttcctcctcatcttatagctccaatgtagcttcttccgtaaaggccttcctgctcctctgcacccctcgccatgctatgggtgtcctgatgccttctctcggctcccccgatccctgggcttaccctgtcacagcctgacactccagctgtcgatccctggtatgtgtctgtctctctcttccactgagtctgagaggacaatgctttgtcaccagagtctgggacaaaaccttcaccaagggggggagtctgtaaatgcgcaccaacttcaataactgcatcctcagcgtctttgggaacacagtggagatgtacctaattcatcctgggaaagtaaaaatgggagggagacatggaggcttaactcagccttaaatgaatgaataaataatggccaggcagtggggagttgggaggagcttggaggctttacctaccacagtgaaagtcctataactatatttcaccatgattttccggtagtctaggagctccccagagaccctggcctggggtggatcctgtgtggtcacgttcatagaccactaagaacaaaggcgccttcctccatcatttccaccttgctgccactggagggagaccccagcccatttatcacgcccattcctgcctcctggaggcccctcccttcatctgctcctgcctgatctcctgagtggggaggctcgggatttatggcaacgctggtgccaaatcgcagaattgtcctaaagcccagctctctgaataagtgatagccttagaataatactaaccacattaaaaataatgtattgctactttttgcctagatcttataatataccagagaccgtgctgcgtgttctataggcacgatctctctgcactctcacaaaagccccatgacatgaacacatttgttatcccaaatttgtcagatggaaaaagaaaaagtgaggcacaactctattaaatgccttgtctaaggtcaacaagtccgttagggttggaactaactgacgacagacgaagccgtcctaacccctgaaatctacaagtagtccaggaagagggggagaagatccctttaggtgtgaaggaagaatggactggaaagtagagaccctgagatccaggacggaaggagggaagaggctcgcttgactgtcataagcttcattttgctgaaacagaccccagaaagggcagtgatgagagatgaggccacaatacaggtaagcaggggccctggagtgccaagcctgtgtgccaggatgaagagtgccgttctatttcaaaggaaaggggaatcctgcaagtgttttaagctgggaaagataaaatccagtttgtgttttgtgaaaattaggtgagtttctgggtggagaaaagacaggcaggggacccagtgctggtgagaaatccatgaggaacccgcagcaccatcttaatgagagaaggcgaggaccaggacggggcagaggccggggatatggaaagcaggggacatgagacctctctagcagggttgttgagcctccacactgttgatgctggctgggtaaactgtttgggggaggggaagggcagaccgccccatgctttgtaggatggtcagcaggatctagcctctacctgccagatgccagtagcacccccaaatgtgacagccaaaaatgtctcagacattgcccagtgtcccctaggagacagaattgcccttggttgagaaacactgctgcagcgatgtcacctagcacagtcttccagatagaaactgaggccctgatttgggtgacagctccaccccttcctagctccatgaccttggaagagacgacttcatcccattggactcttttgctcatcagcaaagaaggacacagcgctttcctgagaatgtgcctgtgaggctgaattagacaaaagcaccttgcaaagctgcctgacacatggtgagcccgcaggaaatgtgattagcaatcacgaagatgagcttcatctgcaagagacaggcctttctttcatcatctaggccgtcctagctggggagacacagcagagggacacagctcacacgcacagagggtgcccaccagccatgctcccccaccggaagactagatctcacctggtacaacccgccctgaggaataaggagactcatgaagaaaccctggccacaaacagaggccccgtactgtgacacttgacctcctgcacaccctctggcaaaagcaatgtaaaggaagaatgcattcccccaccctcaggcgcaatcactaccgccaaggaaccagagttaaggccagcgcccttctggcctttattctggatgaataactaaaggggcttgctgtgtgggctggactgagactgctcctgattatcaaggagacagagctttactacaacatggatgcaaggagggatgcaaggagggaaccctttgaatgcctgttactattaatgtaaaagttaatagaagtttatagcaacccccctatagcaagcatcccaaagggcccagatcccttaggaataagagttttggtcaccccactgggtacagaacatcatctgagatttgggctgaggttagaggaaatatcaaatgaactctggagaaggatagtataaaactaatttttttctaggattttactttgatggtgttctggaaataatttcccatttctttagtgtttttttttttttttcttctctcacaggagaatacattactttctatagcctctccctggcttcatatccttgtttatgattcaggagtatttttattgcaggtctttgttaaatgaatcctgttaagcttgaaaatattcttagtaaaatttaatgataatctcttacagttcaacgtccattcgataggatataaaattaaaaggtcagtttctttaccttcaatacccttaagaaattaatttcttcatgcatccagtattgctattgacaagtctgatatcattttgattccttttttgttattatatgatctactatttttctctctgtcttagatattctgaagtttcactatcctgcttgtccatgtcagttttctttttctttttcgtttgacaccctgtggtgtcgtcagtataagacctttcagttttctttgtttctggagaatttatatttattacttattcaaatatcttccttatgcctttcttcttttccgtctagatcccattttatctggattttggtacttctctcctccatatctatcaatttattgttcttgtttctgaatctctgtggactctttctaggagagtctctcactccaatctttctgttgagttatttgattgtcagcagtatcaactttggggaagtttcattctaaaatttgaatacctttcgtatctattggttccactgcattctttttaatgagttcttattgttctttcctgtacttattttgtactcttatctattcaagtatattcgcattgcttgctttaaaatcccagaacatatactacaataagatatacaaggatgtccagcaggcctctgaccttccctttggagtgactgtactcctcaggtcttaagtcatttgggcctgtgssttatgttcccaggggaggacctgctactctggatgattaagtgtgaggggacagaaagaagcccaagctgcagtgagagccccaaggcagagaagatctgtccagagcagagggaatcactgcggctcactcctactgagctctttggggccatcccatcatcagggttttactctgaagacagaaataagcagtatttggagcccaatactcttctagatcgtaatctgtcattttgtcacctggagcactttctatttattatgtgattttagaatgtaattcttactgtagaaataaacttaaagcagtaccattaataaaattcttgaaaactataaagcactaaacacctgtaagttattactttactgctaggtgcaaagaggggttcagcatggatagctctgaatgctgtgaaaagctgctcaagattcacagcctttcaagggttttttctttataaaaattcaaatttctcatctacctaaataatgatgtaatttagatatgtttaggctttccacgagttgtgtcttgatactatctgtgaattgatcctataatctaaaaaacaatctactgaaaaagctaaacatatcattcagggtcggtcgagttagagaggcagaaaccacacaatgagttgagcaaagaaagtttaatgcaaagaattaataactaaaacgggggattggagtattgaagaattggctagagagaagtagagagaactcttaagaatacagaagtagcttggattcctaggtattttattctctttgaagtaattgtgaatgggagttcactcgtgatttggctctctgtttgtctgttattgatgtataagaatgcttgtgatttttgcacattgattttgtatcctgagactttgccaaagttgcttatcagcttaaggagattttgggctgagacgatggggttttctaaatacacgatcatgtcatctgcagacagagacaatttgacttcctcttttcctgattgaataccctttatttctttctcttacctgactgccctagctagaacttccaacactatgttgaataggagtggtgagagagggcatccttgtcttgtgccagttttcaaagggaatgcttccagtttttgcccattcagtatggtattggctgtgggtttgtcataaatagctcttattattttgagatacgtcccatcaatacctagtttattgagaggttttagcatgaagcactgttgaattttgctgaaggcatctattgagattatcatgtggtttttgtcattggttctgtttatgtaatggattacttttattgatttgtgtatgttgaaccaaccttgcatcccagggatgaagccaacttgatcatggtggataagctttttgatgtgctgctggattggatttgccagtattttattgaggattttagcatcaacgttcatcaggaatattggcctaaaattctcttttttttgttgtgtctctgccaggctttggtatcaggatgatgctggcctcataaaatgagttagggaggattccctctttttctatcgattgaaatagtttcagaaggaatggtaccagctcctcattgtacctctggtagaattcagttgtgaatccatctggtcctggacatttttttgttggtaggctattaattattgcctaaatttcagaacctgttattggtctattcacagattcaacttcttcctggtttagtcttgggagggtgtatgtttcaaggaatttatccatttcttctagattttctagtttatttgtgtagtgtttatagtattctctgatggtagtttgtattcctgtgggatcagtggtaatatcccctttatcattttttattgcgtctatttgattcttctctcttttcttctttattattcttgctagcagtctatttattttgttaactgtttcaaaaaccagctcctggattcattggtttttttgaagggtttttttgtgtgtctctatctccttcagttctgctctgatcatagttatttcttgccttctgctagcttttgaatttgtttgttcttgcttctctagttcttttaattgtgatattagggagtctattttagatctttactgttttcttgtgtgggtatttagtgctataaatttccatctacacactcctttaaatgtgtcccagagattctggtatgttgtgtctttgttctcactggcttcaaaaaacgtctttatttctgccttcatttcgttatttacccagtagtcattcattagctggttgttcaatttccatgtagttgcatgcttttgagtgagtttgttaatcctgagttctaatttgattgcactatggtctgagagacagtttgttgtgatttctgttcttttacatttgctgaagagtgttttactaccaattatttggtaaattttagaataagtgcaatatgatgctgagaaaaatttatattctgttgatttggagtgtagagttctgtagatatctattaggtccacttggtgcagagctgagttcaagccctgggtatccttgttaaccttctgtcttgttgatctgtctaatattgacagtgggttgttaaagtctcccattattattgtgtgggagtctaagtgtcttggtaggtccctgaggacttgctttacaaatctgggtgcttctgtaatgggtgcagatatatttaggatagttagctcttctggttgaattgatccctttaccattatgtagtggccttctttgtctcttttgatctttgttggtttaaagtctgttttatcagagactaggattgcaacccctgctttcttttagctttctatttgcttggtagatcttcctccatccctttattttgaccctatgtgagtctttgtatgtgagatgggtttcctgaatacagcacaccgatgggtcttgactctttacccaatttgccagtctgtgttttttaattggggcatttagcccatttacatttaaggctaatattgttatgtttgaatttgatcctgtcattatgatgttggctggttattttgaccattaattgatgtggtttcttcatagcatcaatggtctttaccatttggcatatttttgcagtggctggtaccggttgttcctttccatgtttagtgcttctgttcagcaggcctggtggtgacaaaatctctcagcatttgcttgactctaaaggattttatttctccttcacttatgaagcttagtttggctgtatgtgagattctgggttgattagtatgtttagtcttttctttaagaatgttgaatgttggccccaactctcttctggtttgtagggtttctgctgagagatccaacttacaagggatgtgaaggacctcttcaaggagaactacaaaccactgctcaatgaaataaaagaggacacaaacaaatggaagaacattccatactcatggataggaagaatcaatattgtgaaaatggccatactgcccaaggtaatttatagattcaatgctatccccatcaagctaccaatgacttctttcacagaattggagaaaactactttaaagttcatatggaaccaaaaaagagcccacatacccaagacaatcctaagcacaaagaataaagctggaggcatcacgctacctgacttcaaactatactacaaggctacagtaaccaaaacaacatggtactggtaccaaaatgttatatagactaaaggaatagaacagaggcctcagaaataacgctacacatctacaaccatctgatcattgacaaacctgacaaaaacaagaaatggggaaaggattccctatttaataaatggtgctgggaaaactggctagccatatgtagaaagctgaaactgaagcccttccttacacaatatacaaaacttaactcaagatggattaaggacttaaatgtaagacctaacaccacaaaaaccctagaagaaaacctaggcaataccattcagaagataggcatgggcaaagacttcatgactaaaacacaaaaagcactggcaacaaaagccaaaatagacaaatgggatctaattaaactaaagagcttctgcacagtgaaagaaactatcatcagagtgaataggcaacctacagaatgggagaaaatctttgcaatctaccaatctgaccaagggctaatatccagaatctacagagaacttaaacaaatttacaaggaaaaaacaactccatcaaaaagtggacaaaggatatgaacagmcacttctcaaaagaggacatttatgcaggcaacagccatatgaaaaaatactcatcatcactggtcattagagaaatgcaaatcaaaaccacagtgagataccatctcatgccagttagaatggtgatcattaaaaagtcaggaaacaacaggtgctggagaggatgtggagaaataggaacacttttacactgttggtgacagtgtaaattatttcaaccattctggaagacagtgtggcgattcctcaaggatctagaaccagaaataccatttgacccagcgatcccattactgggtatatactgaaaggattataaatcatgctactataaagacatatacatacatatgttttttgcagcactattcacaatagtagagacttggaaccaacccaaatgtccatcaatgatagactggattaagaaaatgtggcacatatacaccatggaatactatgcagccatagaaaaggatgagttcatgtcctttgcagggacatggatgaagctggtaaccatcattctaagcaaactatcacaaggaaagaaaagaaaacaccacatgttctcactcataggtgggagttgaacaatgagaacgcatggacacagggtagggaacattatacactggggcctgtcaggaggtagggggctgggggagggataacattaggagaaataccttatgtaaatgacgaattgatgggtgtagcaaaccaacatagcacatgtatacctatgtaacaaacctgcatgttgtgcacatgtaccctagaacataagtataataaaaacaaaaacaaaaaaacataatacagaagtagcaaacattagaagcagctacaaccctctaggtccaagatggagaacctgggaaggagccacctccacgtctctcacctcttcaggggcgaattgcattccttgttggaaagggtgtgcaatggtcactggatgggagagaaatcacagtctctttgctgatgcaacttgtgggaaacctaatattttgggttgccrggaaacatctgttcacaaaaaggtgctgcatctctggactcattgcaaagctacctgagggattcctgggcaattgattcatggagaggtgatgtactggtggcactctgctgtgatgacgcctgaggaggtatcagggaagctgctggctgtacatgatgctggccaacctgtactgcaggaactgggccctggtgaatgttcatggtggaggaacctagtgagagatgtgcaccaaaaccaggaaaataaaccctttccccctagagcaaacgtacagcagcaccgcctactgacaatattgtaccagctgacaaaggagaactatccacagggcccatctcagttactgcagaataaggaatggagagtgaatttggaattgagagacaataagtggatgactgtcacagtcagtgttaacaatgaggttttgctctttaggaataagttatctgaagacaaagcaggaggaaggtctgtcttggtcctggatcactgctgctaaaacttaagcatgcaagtcaatcacctgggtgtttaaatagatttctgggccccattatgagaattctgattcaagaggtctacaatggggyctgatcatttacatttcttaccagttcctaagggatgcttgataccgtcttctccttttacctttaggtaatttatctatcatgaagagtttcttatttttatcacctagttttatgaccagggccacactttatgtagaacactccttctgttctcttctaacttagttattatacacaaggagaagataatcttgatctttctaaaagcatacatttgaaatctttaaataaaagcagtcccacacaamtgcatttctgatcatttaaaaatgtattttcttttttttcaatttaggattttctaaacagattaaagaaaagtaataactatagtaatattttctcaattattctagtacagtatctactcacatcacatatttaatatgacttggaattgtcaatttcacatgatttaacactacacaaaacattttcaaactgcatgaaaatgtaaccaacaggtttttctattgagaagttgtaatataaaaacgtacaaaaagatttgaggggaaaaaaagtaaaaactgtcctgacagcggctttcctttgtttcaatatggggttaaatgttaagaataaagataatttgacctagctctatttttcctaaggtttataaaatatctttctttcatataactgaaaaatatggtaactgtgatatctctttagtcttagtaaaataaacatgtctttattaagttataggatggtaatgagcttcacgttgagctgaggcactaacctgagtttatgcccctggagacttttgcttttcaggcaagcatacctcaaggtatacatgtcacgttgtttcaggtgacctttaattttatcccataaaataatgtttgagcttatctcattttgccaattatttccatgacttactgacactcttgccaataaatcagtgaggctgttttcttaatgtatagagacacattacagaaaaagcctaggtgtgagtcacagttcctggggttttcacgtgaatttaccaacaagcttagaggccttcaacaaatgcttatgtttccctttctgggcctcagttttctcaaacgtaaaaatgacagatttaaagaaattatttctaatgaactctctacctccctgattttatattttttatcaaatatcttaaaatataatattgttgggctttattaaacagagctcatccagaaaggttaataaaatcactggggtttttctcttttattatgatttttgaaataactgtatgagtcttttgttaatatagataaacagtgttgtataatggtggacacgtgttaatgtctgggctgttgtcccactgattttttttttaataacaatactgataacggcaaatgaggtattagcctagtcggtgtaccacaataaaaggaaccactatgtggtagtataatgcagaaaatggtaggaatcggggctctagctgtaatgagatgtgctttgtctggtcatatggtcttcaacttgaattatttaatcgatataaactatagtgaactagtgacttagagaatattgataacactgtcagattgtttataaataataccagcattatacattttatagtgaaattcattccaaataataatgctgaaatgttggcatttttcaatatttcaagaatgttacaagattaatgaaaaaaataacaagtacaatgttaattttttgaattggcactatgaattattaattgtggaaaaaggatcgggcaagcagaaaaggtttattaatttattatttttaatttttttttaagattgggttgttgacgtatcattttcctcattgccatgcaggtgtgaggtgatgtcttttcagtgattccagatgaggcatggcctaaagcagagaatgacgcattctcagatcatgcgatcgtcataactgggcttcatccaccttcccagagatttcctgagaggctccagttcagaccttaacaccagccactaccccacattttccctccaccaccacacattagcaggggaatagaacaaaatggtgaattcagtggggagaagtccctccactggaattccctcatggggagattattctctcctctcccaatgggaaaatgcagtaagtgtcccccagaaaaggggagatgcagaagacacttatgaagacttgggtgagtggccatggttgaggtgctgctaggaaccccacagcagaaggagcaaagattatagaggactgaggccccgtgagatttcagttattgggaaaaaaataaacaatagttgcacatgcataccccaatgaggtaatattgctgaatgtacatctattacaaggctttttctccatattagagctaaatttcagctgccatctaatttcctgttagaattagcacattagtaggtttggattttgtgacgcatcttaaaattcttcgtttttgcatttcatttgtctttttgtctcctgtacctggcagagtgcctggcacagaaaatgcactcaataaatacagaactaaaaagacaccgaggcaggagaatcacttgaacccggkaggtggaagttgcagtgagccgagacggcgccattgtactgcagcctgggcaacaagagcgaaactctgtctggaaggaaaaaaaaaaaaaaaaaaaaagacgtagtgtttgtgtgtttgtggttattttgaggatttttctcatggtattttcattactcagtttcctgtgtgctgttcttgaggcagctgttgttagaacaaccacacatattaaaataatccacagaatgttaaaaaatactgatgcctagattctccctacttaagattttgatctaattggtctggggtgtaagctggacgcaggggtttataaaaattcccaggagattctaaaatacagccaagattgrgaactactgtctagattatcttccttcttaccaattctttcttctgctgtatctaatctacaattttacccattcattgagactttaattttaacaattgtgatttaaatttctaagacatcttttattatttttaattgatctttctattttgctatagtgccattttcttatagtttccacacctgcttttatactttaatcattttaaatttgttttactacttttatggctaattattttataggaaattcttcggaatctacccgtcctacttcatgtgcactgtctcttgcttactgaaccttgttctcttgcatgttttataaatttgaattgtaaacctaacttaaaaagagttctatctggaaatcctgacagcatggtttcaaggagttttgatttgtctttggcaaaatacacaacagtatctccacagccctataaatcctgttttatatacatttctggtgttctgtgtttctaaatcacagaatatttatacctccccacttcaaatcactgtagtggacagggctggggtttagaattcccagagaagcattttttcccctgcagccagcaaagggtagacaatgttgttctttgccaaatgtgttagctctctttaatcattacctgcttctcccaggctgaaagtttctttccctagttccacaaaaagctgggagcccaatcccctggtttgatcattgcccttccctgacacccctccaggaaagctgtatctcagttcatgttatttgccctgtggtttatttctgctataagatttcacttctttgttggtacctcaactatgtgttgaaaataatgctctgattactttatctggcatttctatgggtttatctcaagggactttgcagatgagtctatcttcttgatcacctcaccctcgtcccattcttatcccatcttaacacattgtgcataacagatgctccagaatgctctttgatctcagtgtctactcagcctcactactccatcagcccctgctgtcttgctggagccctcagttacaaagagaaatatttatcatccttttacctccctcatggcttattgactcaatttctttcacatgtgttcatgacacttagagtgctaccaaacttgctccctgttatggatgaaagcgtttcttaatagctcacctgtcccaggatggttgcaggccacagaatgatcactttaaaatagtcatggatttctaaagtttttaatgattttgaaaaaaaaaaaaaaaaaacctaacttttttcaccaaagggtcttgcatgaatgcattttttgtttgttttgtgtgtgtgtgtgtgtgtgtatttgagacagggtctcaccatgctgttgactaggctgtagtgcagtggcacaatcttggctcactgcaacttccatcccctgggttcaagcaattcttttgtatcagcctccagagtagctgggactacagggacatgctaccaggccccactaatttttgtatttttagtagagacggggttttaccatgttggccaggctggtctggaattcctgacttcaagcaatctgcctgcctctgctttccaaagtgctgggtggcataagccaccgtgcccggcaggatgtatatttttaattaaatgagttctacaaaatatatgagattgctggttttctttaatgtacttataggtaaagtctggctggtatcatgtactttacattataaactaaagtagagacttgtgtatttgctacatattcaaatttactttgttgatgaggatactgggaggttgtgctgaaagattcttctttattgattgcacacatcttaaagggaagaaagtggtttacaaaagacattttaaaggacttctagaaagataataaaatagtaatcaagaaaaagagatggttgctccaaaataatatggtgggaaaacaataataaaaataactgtaatgtaattggaaattagtttttaaattatattggtttacttagcttttcaaaaaacaaaagaaataaaagataatgaaaataacatccatcatcagatttctcagactgcatgaaaatgtccttgcccttagttaaaaaaaaaaaaaaaatcagtgtctgttgcatgtgattagccaggcttggttttgattgtttccattacgatcttcttgttagagtgtaatgagatgcagtcctgcacgtatgaatacccatcgcctgtcactgagccatctgtccacaacttaaaggcatgaaaacgctgtctgcagtgaatgagaaaaatggaaatttatattagaatcgttcctttttgttctttgttcatgattgaaagccactcgacatctattcactgggattcagacatttaacaggcaacctatctaacaactttaaaatgtattctaaaattggggtctattttgacatctggacgttggccaatcttttccctgaaccagcttttttttttttaagaaagctttaaaaaatagactttattttttagagcagttttaggtttatagaaaaattgagcagaaagtacatagctccagtgtactcccttcccccaacctcactttcccctattaacatcttgaattggtgtggtacatttgttacaattcacaaacaaatattgtagtttaactgtgcccccagatcccctgtcttttacctatgcatgttcctgccgcaatccctggggttcactgagaggttttactgcctctatagttgttcattttataaatattataacattggaatcttacaatatattgtcttttcagacttttttcatgtagcaatatgtattgtactagttttttaattgtctttaatttcgatttttaaaaaattactcaccagtcacatcactaatgtccattaccaagttaaaaaaatttgtcaggaaaacatttaaacaagttgccagaataagattaaaaaatgtactcaatactaaatagctcactttataaatggagataaataagaaaggaaaataaaacagggtgatgatgtgtgatagaaagagatataggcatatctctttgaatttttgagcctcagtttcttcatctctgaaatggggatactattatgacattccaagttcttcacggttagacatcttatgtgatgtatattgaaggcactcaatggcaatgaaggaaacagagaagaagcagagaagaaaagtcacaagaaagaggatgagaaggatgaaaatgctagaagaggagggaagatacagaagtaggaggaaggaggagactttgctgtaacctaaagtaaaagttgtttctgagaacagggtttcatcacatcaggatatgagactgtcttgataggtgtgatgtagaaaaatatttaccttttagagggtctcctggccatgggaacctaggtgatgtttcaagaatcattttctgaaatcaaaataacagcacaacagctaatgcccatttctcttccttaatgattttgaaaatatatataaagaaaaagaattagactaacgatagtggaagaaaaatggtaatacaatataactatcatattttagctatttcaacccaaaatactcctttttcctggttttccatcagtcttatctctaaatattacatatcaaagtaactattacagtcttcttaaatatggctgaatgttaaagatcaagatgtcactttgctaataactatgaaactacataagaatttgtttcaacctaagaaacatgaaaaggcaaataattgttaggggttctatacacctagataatgcgttttacaaggaaagtttcttctttgagctaacacaactgatttaatctaggcagcccgtaagttttcctagcagtaaggatccttggaaatcttacttgaggagaagggaaactcttttaggcatctgtgggctggcgtccttgacccctcaagagttatctgaactctgcatatcccaggggtatcatcagagttataccctctccagagaagatgcaccaaccacattgctcacacaagtggacaagactgacacctacacattttgaaccctaagtctctagttcctagaattcctttccctgaatctacaaagccaagggacactcagggtgaagagttagtctgtcccttcctcctcaaactcctggggcaccctcagatcatccttaggcacgcccaccttctcagtgctggtgaaccagtgttttatctgagagtcttccagagccttctagttcatgtttatttatgattcccggagaccagccctagtctccttttgtctctgaggtaaacagccctactgcagcctcgtctctctctcatcaggctctgtgggagctgagacagatgacacttctttgtgtcctggcgttatgcagacacacagaggagtgcctttcagatcccctcaggactgctgtgctcataagactggttggctgacaaccccaagttttttgctccttcaggatccacccgactcatgctcagagctgcctccagaaaatgagcaagggcctcattgcagcccaaaacaactcagctctaacaggccagctttcctgcagagcagccccttgggctgacagagactttgtcagcctgcatcacagcccggtggcttccctgttgctgttccttttctttctttggtgtgtctcctccacaaaacttttgccttcctaacttggtctcggcatctatttcctgtgtcaggtattacctacacaatgaactaaaccagtccttaactgaagagggtgagacccatgctgggactccaacatcatgattaaatgatgactagaaggtagagaccaagtctccctcatggcccacaaggattgtgcataataacctttcaataaaggtttgctgaattccattttcaaatatcttgtgcttcagaattcatctttggatacaacatttttgctttttattaacatagccatcctccacttcccctaaagcatacatatgtatgtgttgggcagaaagtctacactttctttgcttaggcatgattgtactgattaaaaaccacctcacaaattcaggttaaccccttgactgctgcaatctcctgccttcacacaggaaggatgccccttctgttcttcattcttccttccttggtgtgacttagtgtctctgcagctcttttggcaggctgtgctgggatgtcattttccaagaaggggtccacttattcagatgaatgcctcctttatttattgtaaaatgttttggcagctatggcaaatagagattaggtgtgggctgctttgcctttgaacacaacttgctgaaacagtaggggacgcatctcccacattccgggaggatatgccatctaataagtcacatggaacccctgaaatttccattcacaaaaggatcacatggaacccctgaaacttccattcacaaaargattgctttgggtaggcagcacataataaggtgccttttctgcaacattattaaatagaaagtttcttcatggtgccaggaggttatattccttgtaaaagttgtgttccttcacaagttgtgttccttcaccattcataaaggactgttgggagatagatttgggcatttggggaattagcttaatttacttcttgagcaaaatctccaggaaatcaacatctggctcttcatttcctgtctaccagtcatcttttgtactctctgtcctttggtattttccatgccagcagcacaaactggaagaaaccaaggaccctctgatcacctgatccagcaatgttgttttaccctttttaggtgatctctcttgactttcaattctaaatctctcctgtcttttccagtttgacattctcctctttggttcttcttgctcttgaatccttttacaccttctaccacctaatgataagcttccttgggctcagttttggtaaaattactccttatcagaaatttactctttttttgttgttgttgttgagacagagtctcgctctgtcacccaggctgtagtgcagtggcgcgatctcggctcactgcaagctctgcctcctgggttcacgccattctcctgcctcagcctcctgagtagctgggactaccagtgcctgccaccatgcctggctaattttttgtatttttagtagagacggggtttcactgtgttagccagcatggtcttgatctcctgacttcatgatccacctgcctcggcctcccaaagtgctgagattacaggcgtgagccactgtgcccagccaggaatttactcttacgactttcaaatctatacaacattcactgaatatctgaattgaaatcccattttgcctaattgtctatgaattatgaatcaatatttcctaatctctattcaaaatcagtggttaatttcaaatggacataagcctctcaggaatgcagcgtgaagctctttattcaaagcatagtttttaaacctgagatccacaaaaccttatgatggccattattataggttccttaagattgtgtgcccaacggtgtgtgtgtacatatattcagctgtatgaacgaagcacacaaactgaagaagtgtacacatagtagagaaaatggacattattcagagtggatatattgtgggtgagcccagatagaacccattagtctctacaacagagaaaaaatggcagtgatggctttggtttccttaaaacaaaactctcctataataacctgaagccttcagtatttctgtggaaacgtattcatcactcctgctattttctttgatgaaagttagtttgaacaatctcttggcccttttctgccgcctcacagcatcctctccagaggatgagaagtatatgaatttagattaaaaaatagaaaatatgtaaattagcacccacttcctcttttcagcccaatactaaactctgtcataagaagacgctactgagaagtcctgagaagtttgatggattgaatagtgtctacatatagatttactattagcaataccatttggctaacatgctgaagtcttgttcttcaacatttgtatcagctgatttaacttttaattttctattttaggtatctcatttctaattttatttgtatttcattttttcccatcatcctcttatgaggaattccaaatatatatcaaagttgaattttttgtaatgaatacccatataccattaacgttttactacacatgtcttaacacgtatctgtccatttatccatctctatccatcccttgagccatttttgtttgaggcattttaatgtaatgcctcaaaaaagaaaataatgcttcactttcccctataattcagcatgtatatcattggagttaattttcattttgagattaaatattccatgaaattcacaaatgttaagtatatatatgttgtggttttttttaaaagaaaatcagtctaaatttatttaaagtcagaatcatttcagaaaaaaataaaatttgacatcaacaacacagagcagagtattcgatcttggctaagaacatttaccaagtaattaaaattacaagtcatgaatgcttaaaaatactttgttcttctaagtgaattgaggatgacccctaaaaattttgtatttattcattaggcaaataattaattttagatagactgaggaaagttaagtttctgaccaaataataaggaattcttttattattattattattatactttaagttttggggtacatgtgcagaacgtgcaggtttgttacataggtatacatgtgccatggtggtttgatacacccatcaacccatcatctacattagatatttcttctaatgctatccctccccttgccccccaccccctgacaagccccggtgtgtgatgttcctctccctgtgtccaggtgttctcattattcagttcccacttaggagtgagaacatgcagtgtttggttttctgttcttgtgttagtttgctgagaatgatggtttccagcttcatccatgtgcctgcaaaggatatgaactcatccttttttatggctggatagtattccatggtgtatatgtgccacattttttttatccagtctatgactgatggacatttgggttggtttcaagtctttgctattgtgagcagtgccgcgataaacatacatgtgcatgtgtctttatagtagaattttgacaaacgcatacactaaagtaactcaaactcttgtcaggttgtagaacattaccatcaccccagaaagttatataattccacttcccaaaaatccttaccccatatcccagaagcaacttctttcttgatttttcccattagagattccttttgcctgttctagaactttatgtaaatggtaccatacccgcaggatggactcttgtgtgtaaagtttctttcactaagcctaatagttttgagactcacctatttgaccgtatgttagtagttcattgtattgttacagatgaagtgtatatcattgtatgaatacaccagagtttattcattctcctgttggtgcacacttccaaatcagggccattatgaataaactatgaacaatcttgtgcaagtcttttggtgaacctacatattcatttcttttgggcaacaacataggatagcaagtgatgagtagatagagtaggtatatgtttagttatatgagaaattaccagatcactatataaacaagttacaccatgttatattcccaccaaaaaaatgagaatttcagtcagtctacaccctcaaaaacaatcaatattgtcaatctttgtacttttagccattctgttgactatgtagtatcatgagaatttcagtcagtctacaccctcaaaaacaatcaatattgtcagtctttgtacttttagccattctgttgactatgtagtaaaatttccctgtggttttaatttgaatgtatttgatgactatgatggtaagaactttttaatgagtttcttagccatttgtacgtcattttgtgaatgcctgtgaaatctttgtcccatattttatggggttacttgcaagtttatgactgagttttaggtgttctttatatatcctggacaccaatacatcgtcagatatatcctgtgactattttctccatgtttatgccttgcctattaattttcttaatggtgtttttgataagattatttttcattggataaaatctagttttttgatgtttcttttatgattatttctaattgtgatctgagaaatgtttgtctaccctcaagtcataaagatatccttctctgtttacttctaaaatcgttatagttttagattttacattcaggtcaatgttctatctctacttacttttacatgcagtgaaagtaataggttaatgttcatttttttccccacgcagatatccaattatttcagcatcacttgctaaaaatactttcctttcgtctttggattccactggcaactttattgaaaaatcagataactatgtaagtgtgtgtctttttctggtctctctgtttcattgataaatttgtcaatacttctgtctgtatctcactcccttgattattataacgtaaagtattacaatcaggcagtgtaaatgttaatgtttgttctttttcaaggtattgttttgaatatcgatgttctctgcctttctatgtaagttttagaatttccacgtctgcttctaccaaaaaaaaaaaaaaaaaaaaaaacctgctgaaaaatgattgtgattgtgtttaccttgtaaatcagtttggaaagaagtgacatcttaacaatatcaagtcttctaatggtttttctctgcatttatttgggtctttttgaatttctcctacaagtttgtttcagttctcaggttagaaattttgtgtgttctcagcgagacgtaatcttaagaattttaatattttgatgctattatatagtaattaattgtattattcatttgttgctagtatacaaatatataaatgatttttgtacattatctatagtaaattcatttattagtttctgaagtagtttatagataccttaggattttatacacatacaaaagtcatctgcacctaaagacaaatatcgtccttcctttctgatatttacgttatttatttatttatttatttatttgggttttattactggctagatttccactgcaatgctaaatagagatagtgggagtgtggatctttgctttgttcccaaatttaggaggaacattcactatttcatcattaatcattatgctggctgtagctttttaatagctattattgcagatggaggaggtctccttgtatttctcgtctgctgagagtttttatcaaaattgagtgttgaattttgtcatatggtttttctgcactgattgacataatcatatggtttttattttttgtgctttcgatatggtagcttaaactgatgtcattgttgcagtgttgagaaactctacttggtcatgaaatataatatttacatgctaaactacacgcatctatgtttaggagagatattttagtgggtatctgtaatgtctgtcagattttggtgtcggtattatgctaatttcataaaatgatttggaaggcattccctctgcctatgtgttttaaatgaaattaagttctctctgaaatcttagatagaattcacttttgaaaacttctcagtctagaattttatttatataaaggttttgatgagttcaattttttaacacatacagagatattttaggttttctttttttttaacttgtgtcagtttgacaagtggtattcttcaaggaatgtgttaattttttctagatttttaaaattattggcatgaagttctttataatattaccttaaaggtaaataaagctatacatttccttgtagctagctagctgcatcccacaaataataaaatgtattttcactattatccagttggaaatattttcttatttcctttctgatttytttctatgacttattttttaagttagatacatatcatttatcattcaacttaaaaatattgtttctcctgaatatcttaatatatatttctaatataattccatcttgctaagagattacgtgagatggggtgatgtcagttattctaaattgataaggcacgttttatggttcagcatatggtctatgttggtraacatatcatgctcagtttatagatatattttgtaattgttgtttaatgttctataaataccaaggatacagtagttgatagaattatccagattactaatattttatctgatttttttctatttgttctatccattgccaagatagggaaattaaagtctcttgtgatatcatttatttctccatagaattctgtcaatttttgcttcataattttggagcataaatatgtatgaacctaatatataggttcattcaaattattttgaaaatctacaaaaaattaacacattccttgaagaatgccacttgtcaaactgacataaggtaataaaaaaagaaaacctgatacataggttcatacatatttatggttattatatattcctaaaaaattgatttttttaggcagagtgcagtggctcatgcctgtaatcccagcactttgggaggctgaagtgggtggaccacctgaggtcaggagtttgagaccagcctggccaacatgatgaaaccccatctctactaaaaatacaaaaattaaccagatgtggtggtgagcacctgtaatcccagctactcgggagactgaggaaggagaattgcttgaacccgggaggcggaggttgagtgagccgagactgcgccactgcactccagcctgggtgacagagcaagactccatctcaaaaaaatttaaaaaattaaaatttaatttttttgtaattatgaagtgtccctctttatatttgaaaatactttttgtcctgtaggcctgttttctctgaaatttatatggccatttcagctttcttaagctgtttgcatgctacatattttgccatccatttacttttaacttatatgtgtttatctttaaagggtatttttataggcagcacatagttatgacaattcctgtcttctaattgaagtgtttgactaaaacaatgattgccatttctgacatgattggatatagatctactgctattttattgtgttctgcttctccctctatttcttgattctctcttttttgattttccctcttaaattatttgagcatttttagaattctactttaaccaatttgctctttagtcacgttcgtttagattactttttgatgtttaattctttgctttacagagaccatttggacttaatattatattatgctacaataaatgtggaaatcttacaagatcataagcccatgtagcaccatatactttatgctatctttgtcacatgtattaagatgcataccgtataatcccacatgacaatattctaatttttgccttttagaaagtcatgccctttaaataaattgaaaataaaatacagtcttttatacttattcataattttacaatttttggtggtatttactctttctgaatacctaagtatccattttgtatcattttccttcagtgcaaataacttgcttaggtatatttgtagtgcatgtctgctgaagaaaattttatttagctttctttcagctaaaaatgttttcattttaactttataatgaaaaatatttttgcttgatgtagaattttgagttgacagacttgttcctttgacacttaaagatatattccacaatatttcaatattgtagttttttgtaaaatcagaactcatttaaaaagttgttttctgtatctgtgtcacttttctctggctctttccaaggtccctctttatttttagtttttagcaatttaaatatgacataactaagtatgtttttttttttaacatttgcttgcttcgtgtttactgaacttcttgaatctgtagatttattactttcaccatatatgggactctttggccttaatattttaaaataattcctcatcattctctcttctctccttcaataactgcaattgtatatgtatgttagccttgatattgccccacagatctgagagaatatgtcaacttttttttgcaatattttatctctgtcatctttagatttgatcatttctattacctcaacttcaggttcacttatatctttcttcttttgacttcattctactaataagactattctaagttttaatgactaccgtattattcttctgttctaggatttccatttgattatttttatagttttgtttctgcactaaaatttgtctctttattcagtataaccattttttctctctttcttttttttttgagatggagtctttctctgtcacccaggctggagtattgtggaatctggtcagcagcccacagtgcaacgtggctctctctttgctctcaggtagatcagcaggttaagaaataatagacacacacaagatagtgaaagctgggtccaggggggtcaccaccttctggtcctatggtgccgccaatgcactggatataccagcatttattattaagtttagtgagggtaggggtaggttagtgagggatttagggtcatttgattatgaggtgagacggtcacatggggatgaagtaattctttaacataacatctctatgcagaagtacagtatacagaggtaagaatttacaatatagtgtgtgcatcagtaatttctaacagagccttaaaacagaaacaccaggaacacagtctttccataacctatgattagcaagatattaatcagcagtaacagttgcagcaaaagctggttacaaacaatccatagaaataggacgtgaagctagacacctggttagaccagaaattctcagaagggagtatgccttaaccctaaagaggcctacaagaaccgtggcaacatgagagcgtttatagccctatcttatccatatggacaggtgccccccaatgcgtccgtttataggctctccacaagggttgcattccattcccagagctatgaacatctgcttttctgggataggaatcttggtgatgtgaaacctccctgactgtgtgtccattcataagctctctgcagggggaagcacatcacatgctgttggctcattctggcagtccaacctggcattgtctttatacaatcctgcatgcaattttgtatttacaataatcraaagcatttcatcttctattccatagcaatagtttcagggaatctccctacactggaatgtagtggcatgatctcggctcactgcaacctctgcctcccaggtttaagccattcttttgcctcagcctcctgagtagctgggattagagacatgtgccaccacacctggctaatttttctatttttagtagagacacggttttgccatattggccaggctggtctagaactcctgacctcaggtgatctgcttgcctcggcctcccaaagtgctagaattacaggcgtgagccaccacacccagacagtgtatttcatattagctcatttaatataattttaatagctgccataaaatgcttaaatgctaattccagcatctgaatcacttgtagttgtttctgttaattctctttccccttgagaatggctagcattttcataggacttattatttcagataattttggattgtatccagacattgaattctgtgataatcttcaagagtgttttgttttgttttatcaggaaactcactttgttgaattcaaatgcaaattatgtgccatttagttaagcaacagttccagtgtcggttcagttctttcatcctgagctgagctgctttgagttttctccatgtcggttcccacacacataaagaaagagctccatgtatgtgaaattctcccacaaattcttctggagttgatacascaagtttgaggctccctctctccagcatgctccgtactgatatccgtaactcacttattagtcgctgttgttggatctgagctttatcctctggtttttcaggccagaaagattattgctcttttagaaacatttttttactccacatgtaattgattgtagcctgccttcaggttaataataaagccatacagtaggaaatgcatctcatgtctttcacatattggctctcttctgggatttacctacttttgtgcactccctcgtgcattcagaaagcttttttttctttttgttcttttttttattatgctttaagttttagggtacatgtgcacaatgtgcaggttagttacatatgtatacgtgtaccatgttggtgtgctgcacccattaactcgtcatttaacattaggtatatctcctaatgctatccctyccccctccccccacccsacaacagtccccagtgtgtgatgttccccttcctgtgtcctttgtagggacatggatgaagctggaaaccatcattctcagcaaactatcgcaaggacaaaaaaacagacaccgcatgttctcactcacaggtgggaattgaacaatgagaaagcttttaaaaaatattttgcttctagagtttgtggttcttctctgtggtaggatcagtctggtaagaatttattcggccaaattaagagaaaactctttgtagtgactgatattttgatctccacttacttggcttctctatctctccaatcctttttgagtagtccattaaaataagatattaagatatagtaataattataagagagaatgggattgagctgaaacattatcaagaagaacaaaataatgggtgaattggaaatataaaaagaatcaattggatttggcaaaaatttattttcaaaaggctaaggaataattctaaagctagttgattttcaacttaaaagagctagtaatttcttggtacagagcagtctgagggtattcaaaagaaaataagtatattggctaaccctgaaggagttaaaaaaatgggttaaagcctgaacatattgtatatgatgtgccagcatggcacctgtgtgtaccctacagcaataaaatgaaaatttaagtttaaagccaagaagcaatattagggaagaattgtatatttgtggatcaatactgatattagatctaaatatattagaatagactgttgcagggattctattacagtttgaaccagatgaaattgttatttctgtgaatcagaaacagtcacacactggcaattttatatggttcaaccaaataaacagaaatcccaaagcagaaacataggaaacaccaatcttatttaagaaacaaattacctaataggaacctactgggagatctattaggagaggtcagcatagtaggagaggggctacagggccagtaaatatgtaaagttgatgaatgactgaggtagcactagagagtaatgagaaaaaaatataaatttaataaattctgctaggaacattggttaattatatagaaaayatgtagtaacattcttacatcatagacagtaatgaatgtacgcatgtatggatgtaataaacatttagaaataaagagaaacttcaaagctcttagaagaaaatacaggagaatatttgtgacttgggggcattaagtcaaaatttgataaatgggattatattaaaattaagaacttccattcatcaaaggacactataaagaggcagttcacaaattgggagaagtcactgtaacacctaaaaccaactaacacattgaaccaaaaatgtgtaatgaacacctaaacatcattaagaaaagacaacaagcaacccagtagaaaaagagtcaaataatgtgaacatatatttcactgaaaaggaaatgtgaattgcccgtaaataaatgaagttatgcctctttaacaatgaagaaactataaatttagaccatactatcccactagtgtacactcattagagcgccaagaaaaagtttaataatagcaagtgtcactgagggtgtggataaacacccttacacatttctactgaggttatgaaacagtataactatttttgaatacattatatggtaaatttaaatagtttcatactttataggccagtaacctgtctctattatatactcatgggaaacttttccacatgtggacctgaagacatctatacaaattttcatagaaatattaattgtagtgtaaaaattaagattgtatcaaaaagtatgcaaaataatacagcaatgagttattatataaacaaaataaaatattatagggcaataaaaattgaattatggtacttaacatttagtgacaaaaggaatttatagatgacatcctatagtataacttttatttatttattttttcagattgggtcttgctctgttgcctaggctggagtacagtggtaccagcatagctgatggtatcctagaatttctgggctcaagtcgtcctccagccttcggcttctgagtagctgagactaaaagcccataccaccatgcccaattattattttttattttttatttttgtagagacagggtcttgcttttttacccaggatgctttcccactcctggcatcaagtgatcctcctaccttggcctcccgaagtgttgggattacaagtatgagacactgtaattagccagtataacatttctgtaaaaacccaaactaacacaacttcacagtatagtattttgaagtttatacaaatgttattaaactataaaaataaaaacatattaataaaaaattcaagaaatatggggagaaagacatagtatatagaaactcacagattcatgtattatattagtaacaattatttcttaagctcagcagttagttcatgaatactcattttgttattatttttaaaatatttccttaaaatgaacttaaatattttaaattaaaaaggaacrcataaaagtaattatataaataaaacaacaaaatctaaaattctcattgttatataacatataaattcatatgtattctcttatacattacaataaaatatataataaaataatatatattagattagataaattatgtctcaaattccattatattctatatatcagaaattcttaatattactataattaattttgtaaatagtgttttaaattccatgaaataaatccccatgtctttaaaaattatcctgaaattgaaaaagaaaaaaaggtttttaagttttattatatatagcatatctaatttctcagagaggaagaaattacaatagaatatttcatttctggataaaaatatattagtgagaaacagaagcaatgaagtctaagtatatcttctcaggctcaatgaaacagctggtgccctagacattttcctgtttttcctcttgggaaccgagatactgaccatatatgtttttctagactaaaaataaatattagcccgacgcttcaactgaatattagtccagcaagccctgagggaaatctaactgcagatctaaaagagtcagtaaaatgtatcacctgcttttcygcttccttgtgaaattgcttttaactagggagtgtatttgtatgaatatgtagggattcattcataaacagaaaaaataaaaataaaatggatgaaaatgagagacatcaaattcagaatgatgagtgagtgcatgggtaggggtgtacaataactttggttgataatgtttattttatttatttatttatttatttgaggtggagtcttgctctgtcacccagcctgcagtgcggtgacgctatcttggctcactgcaacctcgtcctcccggattcaagtgattctcctgcttcagcctccagattaactgggattacaggcacccaccaccatgcccagctaatttttatgtattttaggtagagacggcgtttcaccaygctggccaggctggtcacaaactcctaacctcaggtgatccacccgcctcggcctcccaaagtgctgagattacaggcatgagccactgcgcacagccagtaatgtttattttgtaagctgaatagcatggtgaaggatatgcactatatccttttatacattttgcatgtctaaattatttcataagaaatgaaaacttccaaactattttaatgagaaaccaaaagcttatgaagtaatggtttcttccacaaaaatttattatgcacctgcaatggtcaaagctatacagtacatttattttcggtggaaaataaagaactacaaaatttgaacttgaatactccaagagaaatggagtcaagtcccaagtaaccttacataatgtgtcctatattcctgggacgcaatgtgaacacagagctgtcgatattcaatcggaagtggttcctccagtgaggaagcacctatataaagaagtcatcaatccatctgagatctggggatgagaacttatttttcatggaaataattgattgtgagaaagatttcaaaagaggcttaagatagcatttgctttactagggagtgcatctataagaatatttgtaaggagatatggaggagcatgactgcagctctgcaggctgctagaaaacaccatgtgataatggaaatagcagagcatttggcgtgagatggcctgagattccctcctggccatgtcacttaccgagagtcgtggcacttggcaaattactacctttcacatttggcagttgggaataatgggaaatttcagcctcatggttttaagagtaacaagtcaagtaatacatgcactttgatatcataagactccagataaatgttagtttttacctttaagtagtagaaaagagggctggggaattagattgggtcatttggtgaatggtcatgtgtagactgactttagagattttcatgattgaaagcggaaggaaaagtcacagatgaatgaaaagtactgaacctggtcttgcatgctgagtcatagctaatttggggttggctattacattttgtacacattgtttgatttgatttgctatatttttaggaatttttatctctacatccaagagttacatgggctgataatttccttttctcaaactacattctctggcttggatttaaggttatgacaaaatgacaaaagtgatagaaataatttcctcttttctgtttccagaagggaatgatctaaacctataactgtcagttgaaaacacttataaaaccattggggcatggtatttattttgaacaaccatactattatttcaattactttaatatttataaaattatttagattttctatttcttattgtgccaactttggagggacatgttttctgagaattcatctattttgcctgtggtttgatatttattagttaaaaattgttcataatattctcatattttagtttatatgtccactttatccatagttctctcccatgtttcatttataatattatatatttgtaacttttttcttttttcctcaataagttttatcagaggtttggttactactaatctattaaaagaaataactttttggttttattgatctgcctagtccttcttcaccttgcagtttcttagaatatattttgtgttccttttctaactactttagtacttatgctctagatgatcttcctcacgaccccatgctcatctctctgacctcccctgcaactgcttttagtcctgctgactctgcttagaccwgcaattctccttgctgttcctaaaacgtaccaggcatgctggtgctgagggtctttgctctgttaactctgcctgcattgctttaccccgatcacctctaatataacttcctcattttaaagtctttctcatcctgtcttctcaatgagtcctttctcttctattaaatactaccacctcctaccatagcacttgttaacttgtaatacgcagttaaatacactctaaaatacaactgttagccctgcatagctctctttgcctcctcaagcctcagttctaagaaagtaaagggttggactagatatagatgtatagttttcccttcctttccaaatagaaaattctgtgattctataatttgaattttgcctattaagccccaaagatttaacagtgtatggttttcagttgagacaaagcagaatgcatgagtgtgataagaattattagagaaggacaaaaaaacaggcatttataagaattagtgaagatgggacatacctaggaggaaagcccagcattatgttatagtaaacaggagtgatataatatgaacgagttgattcttgtcttttctgggagtcatagctgtctggtggctattttgaataactagaacactaatgccaacttgttggcactttacattaggtaaatgcttgtaactgctcactgtcttagcaatgagaaataacctggaagtacaaaaagatgttcctttaaaatacaactcccaggctgggtgcagtggctcatgtctgtaatcccaccactttgggaggctgaggcaggagatcacttgagcccagaagttccagaccagcctgggcaacatagtgataccctatctctataaatttttttttttaattttccaggtatgatggcatattcctgtggtaccagctacttaggagactgaggtgagagatacagcttgagccagggaggttgagcctgcagtgagccgtgaatatgccacttcactccagcctgggcaacagagccagatcccatctccaagggaaaaaaaaaaccactcctagatgattactctagaatagaatctatgtcctcaaggagccatgaaagggaactcaaaggatttcaggattggcaggtgtgcaggttttggcttaataaaacaaatctcagggcttgaccctgtacacattacttaaattctctgacttttgttttcttcactcaaatgcgtgttttataatattctcgcctcttgaaatattgcacgtaattttcagccttgtttcaggtaccaaggatccagcagacaatatataccatgccactccttctggagttcaagttttactcagggaaaaagctaaggagcttaatttgcaagcaagtcatagcttcatacattaggatgctccgactcacacttagatgcacaatgtatttaaatcaattgctttttagtgaattgtttatgtgatgtctgcaatttgacaaggaagggagtgagggaaaattatcgccagttaatatattctggtagaaacacttataattcccagactacttaaaatgctcagcagcattcaactagatataatgaaagcaataaatgaagcaaatttggccttgaagttattgagtgactcctgattttacaataaatgatagcagaatgctctggatgactctcaaccagaaaagcaatctaaaaaggcgtatatgtatcaagagtgtcacaatctttttgggggtctatttgtcactttgtcacctagcacagctgtgaaaggtgggtaatgaatttcactttttccttaccattccagacatctggaagatgtagtttcagtagaaagtggcttcagctggagtagggttgtgtttaacatttttgctgagaaggcattttgaaaggtcctctggtcaaattaggctaagtgctaacattgaaagcaagttttaagtaattgcttatctttcagagctaagtgtctcccatattatatttgtggcaataggacaaatggtcacagatctagtcattataaatctgtccaaaacatattaaaaggtgacaggttcatgataggggctgggaaggggacagttataaggctctgaaattagaataaaccattccattaataactttatctatacttgcatagggtatcatgcttcgtaatctaaagcatatgcaccacatttatcatgttggaatatatagctatttgaatagaatctaaccccccacttttctatcattttacccatcatttagtcattcaacaaacagttattacaaacttgtcatatgtctggtccttgggaaaacaaaccagacaaactctgctttccagtattgtagtatttagaggaggacagacctgagaataaataagttcattcctttggaggaaatgtctaacagtccctaaggcagttaagggaaacctttacagataagaaaatgattacattgaatctttataaaaatttttttgccacccgttatgcaggaaaaatgttggatcttgaaagtggagtaagaataaatgtggcagaagaaaatggagaagaatgtttatgtcagagagatggaacataggcagaagctcaaggagatggaggacattgtaaatcttagaatatgggaggatgtgcataggcratatgcaaatactatgccacttttcatcagggatttgagcatccttgaattctgacatccttggaagtttctggaaccaattcccatgcataccgagggataaccttatatgtggatatatacatatatagatgtatatatttaggtctttaagtgtgtgtgtatatagttatatatgtatgtaaaaagtagagccaatgaatgagaatggtaaccaccaaattaaggatggagttttatcaggatagaggatgagaaataagataagggaaacgtacattaggggaattccattctacttttaaggtaagcattcaatacacaaacttaatattattattttgtaccatctgtagatataaataattccataataacataaatagtaacagaaaatggggagccactgcaattgaagcagggtggcaggaaatggagcactgccttggggtcctcatttaacccaacccacccactgtagccctgagatgtagattttacaaacacttaactagagcatatttacatttttattctactttagcatcctgtgtcctcactgtcttaatttttttttaaaggcataagctgcaggaatcttggttatctttccactgcactctcattgttcctcagccctcagatggcatattgtgtgagcagacacccccatagaagcagaggcggccttctaggtaatagaatacagtgactgtggaaaagactcccttttccctaaatgaggactttagttctacctctgaatctgtcagttgctaagcatgtagatttcttatatataaaatgaggagattagatcacatttcttcaaattcaatattccttttatgcttctttctgaaaaaaaaatgtatgaatttgcagcagggtattctgagatcacaatagagaagacaagacagaaagtttgagagccttggttgggaagaatgacctggctacagagcatcacccaagcagggatggtcaataatcacatccattttcaatctggtcggatatactcaagtctagtccaagattctgttggtatctgaaggaaaactggaggagtttctaggctgttgaaactcttgcagtcagtaaagtagaggattttgcttctggaatgttgagttgtccttattgaagcaatctaattcatattttcaagtaaatggagttgatataggataagcagtttggtagagccccaggctcccataggggcataaattcagaacaaagttttataggaaccaggagaaaagcgtggaagcttaatcacatgaagtaagctcctgtgtattccatgaagggtggaataaaacaacttgtttaatgtatacgtcccagcactcaccaaggtactctagtcttgctttactcactgggaaatacggggttttaatatacaggcagggtgggttcccgtgagactggggacaaagtatatctaggtgtagactctaggcctgtagttctaaaattttacttcacctacaaatcatccagaaggctttttaaacatacattttcagaaattaaattttggtttgctttggggtaagagaatggagctcaagcctaaagctgggaattgagagccaacattcttagagaagagaatcacagagaaagttgctgtaaaatctatgtacatactccactcaaattgttggctgctttctaagctatggatatataaggtgagagtcaaaaatatatagaaggaaatagcagatagtaggctacaatggagatcagagcgtttactagtcacctatgctggggaggctgagtctggagtactgagagttttcaagttagagaagcccttataaactctatgaacttttctttcacaccccagaactcttgccacagaagttctacacctaaggattaagaacaagcgtttaggaataaggggtatggcctgggaggaagaacaactttgaaacaaaccagccctaattactgtccagctaaaatccatgcgacaacacaatgatctattgtactgtgtgtgctcacctctttaaaggaagactttttttatataatactctttgttatattaaaagaaataggaatcttgattaaaaaggcacttgatcggaaccaagagaaacaatagacactagaaacaaacctacaattgattgaattgttagagttgccaggcagaaactctcaaaagaaaaacacaagctataattaatatattcaagattatagagaaaaaaagattgagaattttcagcactgtggcagccaaggaaatggaatgcttagatcacctttcaagaaacaacttgctctgagaggtgtagttagcagacaaccacgaaagaaaatatggatagattagactctagcaattttaagaacttaattagaaacatcattaagatattaaaagttaagccactttctagtagatgatatttgtcatacatatatctgacaaagtgctcatatccactacatataaatgactattacaaatgcatgagaaaaagacaactcaattaaaaaacatgagcaaaacacttgaatgggcacttcacaaaagaggatatctaactggccaaaaagtataggtgctcaacattatttgttattagagatatgcaaattaaaatcacaatgagataactcttcatacctagttttggcaaggatgtggaacatccagaagtcatatataggtgggggtataaattgaaaaaactagcagagtctattaaagccaaacatatgcctaatccatgaccctgtgattccactcctaagtatatatgcaagaaaaataaatgcagatgtctgtcaaaagacatgaaatttacttataataggaatccatagtggctgaaggaaaagttaaaatataagggatttctggaactaaaagggtaaattaaatcagaaggaaagcacatgcaatcatcggtccaaaggattctggagtgatcactctatacatgggatgatagttgaggctttcaattgtggactggaatgtgaaatatgttaggatgggtcagaaagttttaaatggtcatgtgtattctaggcagattaaaaaaaaaaaaggagcactggctgggtgtgatgtcttacgcctgtaatcccagcactttgggaggccgaggcaagtggatcacttgaggtcaggagttccagacaagcctggccaacacggtgaaaccctgtctctactaaaaatacaaaaaatagccaggcatgttggtgcgcgcctgtaatcccacctactcaggaggctgaggcaggagaatcgcttgaacctgggaggcagaggttgtggtgagccaagattgtgccactgcactccagcctgggtgacagagtgagatgctatctcaaaatatatatatatatatattgggcaggggcttcaaccagaaatgattctggaagagctggccttgacaatctaatatcatggtttgctctgggcatctaaaggactaagcacacaaaatattaagcacacaaaatatagagtcaggtaacgatcacacaaagaaaacatgggaaaacactaacagccaactttgcttaacattagatttttactatctaatgccatctttcacatggctgctttctcattctattgggtgtatgctttatgtaaaaattgttaataactgccattctgatatcactttgctgttcccaaaaacagttgtcacattaaagcagaaaatactagttcagaatatatgagattttccagaagttacacaaagtctcatgattctatcatcagggtttctgaacctcagcacgtttaactcagactctccgtgttctatcctgtaaagacaggagaaaaatcgctggcattgtaagatggatatgggcttccaatgaactcgtttagctcaataaagtctgaaaacatataaaggatttttatgaaagacctagcggaatccagctactaaagagcatgtctacatacgcacaagcaaatgagatgatattagaaaccatttcaattttctcatgactgtgggacaactgtcccttattcttcagcacagttaggctgacctgcagggctaccagtgtagagaggtattagattgtctctgatgtaaataggaaaagttaacaaggtattgctgtagttacacagtgctatcccaagccatcctgacttttcccttccatgccgacagcaccagcaccacctggagtcatcttggactgtggtgtcgtcttcggatgctgtgctagtttggatttctggactgcctaactctttacttctctaagaacagcatcctccacgggacaaatatcctcacagccaactggactttggatggatacatgatccaaagtaggccaattaaatgggtttttgggattagaactgagagtcagtctggtcaggctgatatggattcttcaaaacgagtagacgagcctcagaagctattaggtaagactaacaaatgatgcctgctctacgggatggagggagcagcagaa

SEQ ID NO: 96731 - DNA, 13451 bp, Homo sapiens
aaccccagaagggttattgttttgtattatttatatatactatacttcttaaattaaatgtaacacataactaaattcaggattgatcccaaccttctagagccagctcctctggcgtcagggaggaaacagttgtcacatcaccatgcaggttacattcatcttccactggaatgactagagccctcaggcagtggcctgactgcagacgagcagaggactggctcctggggacagacaggctctgttgcttctcctcattggtcatggcttagcatggttcctccccacaagtccttagtaaacaaagcaactcgcaaaaacccaagtcactacttttaaactctgttggataaggggagcttttccacagcttggactgagaacctgtgctctagaagtgctattctgactagattgtatgaagggagtgggtgcaggagacaaaatggctaaaatgaaaatgggagtcactggtccccatctgcagctacaactcaagatgtctacagatggggtcagtgtgacatgtgcaggtgggaggggcagagggacaagacaggcagggagggtgctcctggggacagtatcctccctgctggccttcacttcttggccttgccctgggcagccacagcttccatggctttgcgtaccatctcttcatcccccagaaactgcatgggcttgataggcttcaagttcttgtcccattcatagacaatgggaataccagtcggcaggttcagctccatgatagcctcttcagagagaccctccagatgcttggcaatgccccggaggctgttgccatgggctgcaatcagtacacgtttcccctccttgatctggggaactatttcttcattccagaaggtcagagctctggcaatagtgtccttcagactctcacaggagggtagcagatcttctgtgaggtctgcatacctgcgatccttactgatgttgctatagaaaggatggttgggctccattggaggtggtgggacatcataggagtgcctccagatcttcacctgggcctcaccatgctttgcagcaacctccgcctccctggttcaagcgattctcctgcctcagcctcctgagtagctgggattacagatgtgcgtcaccacgcccggctaattttttttttgtatttttagtagcaacggggtttcatcatgttggtcaggctgatcttgacctcctgacctcgtgatctgcctgcctcggcctcccaaagtgctgggattacaggcgtgagccaccgcacccagccgtgaggtgccagatttttatctttgccaaactgctaagtgggaaacagtctcttggtgaaattttaattcacatttgcttttcagtgagctcaacatcttgtcatatgtttaagacctatttgtcttcttttatttgtgaactttttttttttgagacagggtcttgctttgtcatccaggctggaatacagtggtgcgatcacagctcactgcagcctcgacctctgggatagctgggactacaggccaccatgcccagctaactttttgtatttttggtacagacagggtctcaccgtattgtccaggctgatctcgaactcctgggcttaagcgatccacccactttggcctcccaaagtgctgggatttacttttattttattcttagagacagcatcttgctctattgcccaggctggagggaagtggcacaatcatagctcactgcagcctccaactgctgggctcaagccaccctcccatctcagcctctggagtagctgggatgacaggcatgcaccaccacacctggctaattttctaatttttttatagatggggtctcattatgttgcccaggctagtctcaaactcctagcctcaatcaatcctcctgtctaggcctcccaaagtgttaggattataggaatgagcgaccacacccagaacatgattttttatatatgtatatggagaaaaatactcctttaagatgttaattgtaaatgttttcttcagtccatcattttgacataactgtatggatttttaatgtagtaaaaaatgcaattttatgacttttgggttttgtgtcatagttaaaaagactgtttccacactgagatgatacaaaaagtttctcctttagctcctggctgtattttttttttttttttttttgagatggagttttgctcttgttgcccaggctggagtgcaatggtgcgatctccactcaccgcaacctccgcctccatctcccgggttcaagcaattcttgtgcctcagtctcccaagtagctgggattgctggtgtgtgccaccatgcccagctgatttttgtatatttagtagagatagggtttcacgatgttggccaggctggtcttgaacacctgacctcaagtgatccacccacctcagcctcccaaagtgctaggattacaggcatgagccaccgtgcccagccagcttctggctgtattttcgttttcatttttgtacgtttaaatattgaaggttaacatttaatttttatttttatttatttattttttttgagacgttgtctcactctgtcgccgaggctggagtgcagtggcgcaatcttggctcactgcaagctctgcctcctgggttcacgccattctcctgcctcagcctcccaagtggctgggactacaggcgcccgccaccacgcccggctaattcgttttgtatttttagtagagatggggtttcaccgtgttagccaggatggtcttgatctcctgacctcgtgatccacctgcctcagcctcccaaagtgctgggattacaggcatgaaccaccgcgcctggcctattttttattgattttttagagatggagtcttgctttgttgcccaggctagagtgcagcggtgctcactgaggccttgaacccctaggctcaagagagcctcccacctcaggctccgaaaatgctgggattacaggtggtgtgagataccacaccagacctagagtttttattttttaatttttaaaaaaatttttatttatttttttgagacggagtctcactcttttgctcaggctggagtgaagtggtgcaatctcggctcactgcaacctccgccccctgggttcaaacaattctcctgcctcagcctcccgagtagctgggattacaaacgcctgccacccaccatgcccagctttttttttttttttttttgtatttttagtagagacgaggtttcaccatattggccgggctggtcgtgaactcctgacctcaggtgatccatctaccttggcctcccaaagtgctaggattacaggtgttagccaccacacccagcctttttaaatgtttttttcattaggaacaacatattccaaacctataaattgagttcatctgtaattttttctaagatacaaattatgaatccaacttactttttttccagattgctcccttttcttcctaatgtcttttattaactcatcttttctcaacagattagaaatggtacttttatcatctactacattcctgcctgtatttgaatctgtttctaaatttctctgtcttctattgatctctatgtgtcagtaaccctctttaattattaccttttaatgatagatttgttgtgttttaatatctggtaggattagtctatactcattatgtcttttattttcagaagtttcctacttgtttaatttgccatatgacctttaaatcagcttttctagtccctccttatctcccaccagaagactcttaaaatttttcattgtgatacacttagagattaatttaaggagaattgacatctatatgaagcatcttcatatgaagaccaaggtgtcagcccccttgcctctgctttttggtggctagtgactcccaaatttgtacctctattttgagcacaaggtctgttcctcacccctaggaatctcctcttggatagggggatcccaaagataccccataccctgatcccatactgtccctccagcttagtgcattcccccttctctttaatctactcaggtgctcaagccagatccagggtctgaagttgtctttggtctctcctggtgtccaagagccatatctaaccagtgactaagttctatttttttttttttttttgagacggagttttgctcttgtcgcccaggctggagtgcaatggtgtgatcttggctcactgcaacctccatctcctgggttcaagtgattctcctacctcagcctccctagtagtggggactacaggagcccaccaccacgtccagctaatttttgtattttttagtagagacagggtttcgccatattggccaggctcgtctctcgaactcctgaccttatgtgatccgcccacctcagcctcctaaagtgctgggattacaggggtgagccactgcgctcagcctgtggtatatttgtaatcactgatgaaccaatattgacacaatattattaattcaagtccatagtttacattaaggttcactcttagtgttgtacattctgcaggtttggataaatgcatgtcatgcatccgtcattacagtatcatacagaatagtttcgctgtgctaaaaatgccctgtgctccatccctctcctacccctctgaatccctggcaactgctgatctttttaccattgctagttttgccttttctagaacgtcatatagagttattggaatcatacagtatgcagctttttaataccagcctcttttacttagcaatatgcgtttaaggttatgctatgtctttttgtagcttgatggctgatttctttgtatcgctaaattttaaagaaattgccaaactgtcttccaaagtggtggtgatcattttaccctctcttggtgtatgacagctccagttcttctatatccttgacaacataacaacacttggtatggttgatcttaacttttagccattctagtaggtgttcttttagaagcagtccttctagtggctttaatttgcatttccctaagagtaatgcactcagtgttttttaatgtgcctatttgccatccagagatctttttggatgaagtgtctgttcaaatgttttgtccattttttgacaggcgcggtggctcaccctgtaatcccagcaccttgggaggcagaggcgtgcagatcacttgaggtcaggagtttgagaccagcttggctaacatggtgaaaccctgtctctactaaaaatacaaaaattagcctggtgtggtggcgggcgcctgtaatcccagctactggggaggctgaggcaggagaattgcttgaacccaggaggtggaggttgcagtgagccaggatcgcgccactgcattccaacctgggtgatggagcgggactccatctcaaaaacaaaaacaaacaccagaaaacaaacaaatgttttgtccatttttattggatttttattcaattgtaaaagttctttatacaagtcctacatcagatagaatttttacaaatattcgtcctagtctatggcttatcttttcatttttaatagtttcgtgcattttgagaaacaaaagcgttttattttgatgaagttcaatttattgatttcttctatcatttacactttttgtgtcatatttaagaaatctggccaggtgccaaagctcacacctgtaatcccagcactttgggaggctcaggcaggaggactgcttgagcccaggagttcatgaccagcctgagtaacacagcaggaccccatttctacaaaaaatttaaaaattagctgtgtgtcgtggcacgtgcctgtagtctcagctactcaggaggctgaggtgagaggatctcttgagcccaggagtttaaagttacagtgagctgtgatcagggcactgcactcctgcctggtcaatgaaagcaagaccctgcctttagaaaagaaaaaagaaatcttttcaaacccaatattgttaagattgtctccatttttaaaaaaaaaagttttatggtttggccatttatatttaggtgtgtaatccagtttgagttaaattttgatggtgtatcctaaatagttatcaaatccatctacttctgcctgccacctctctagtttaaaccacccttctctgtccctggacacctgcgcagaaagcctaggagctggttccacccatcactcaccaggttaggtatttcaggcaagtcacaccctctcaggcctcagttttcctcttttgttaactgagggtgaaagtggggttagattagatcagcggctcttaacttttgaggggtcgtgggccctagagtcctgggaacgctatgcagtttcctcagcaaaatgcttgcatccacaacmtgcaagactgcagcagctgctgggctggggctgcgagaccagcgaaaagccctgacttgggggggtctcgggagtctctgcagtctccccacccacacccccggcctccgcgccgaatcctggccccccaacttcttgcagcccgtgaagcaggatctcagggtcctgggggtggggagagggggctgccgtcctgctcgcagcctctgccgccctctcctgggtaaggtgacacatgggcgcttccaggtgggtgggctgagagcctgggggagagaacagggatgtccacctctctaagtttccaggttcaagaaaccccagaacgttagagaaagatgggctcccacaattgcccaaccccatcccataggatgcacgcatgcggaaagtcgggccgaacggggcagggacttacccaaggtcacgcagcgagcccggtccccctgcgttccccggggagcgctgagccgggacgcggcggtggggtggggaaggggagtggcgcggccctgcggggtgaggctgccgtttgctgagtgtccggcaggggtctgctcgctgccagcccggcccctcctcagagcagctgccgcagcccgaggtaatctcggccccgcgccggggctggctgggaacggcgggagcagctgcggtcgcgcggagcgaggggagctggggaccgggcgggcccggggctgcgggaggcggcgccgccgcacaatcgccccggaatgcccgccagggcgcgcgtggggtgcggccgtccggccctgcaactcgagctgctgcccctggttaaaaataccccttgcccgcccctccccctcgtttccccgcgtgcccttccgccgcgccccagcccccgcatgtccccccgcgctggcccctccccggggactgctctgccttttactaatttgtcctctcgcggaattggcccccggctgcggagggaggggcggggagacaccgtgagtaagagatagtcagagaccgtgccggagagataagggagagccgagaggaagcggggtaggagccccaggaggaggaggaggagaaggagagagggagggcggagggcggaggggcggcgggaggagggcggggaggagcgctcttcctggttgggccctgccctgagctgccaccgggaagccagcctcagggactgcagcgacccccaaacacccctcccccaggtaagaagctgggtagccgagccgggattccttgaccctggccactgctcctgggctgaggggctgccccagcacggtcccttctcgggggcctctgcgttcctggagcaggggtgggggctggcggagcggcacagcccaggcgcctgtcccagcctggctcaccgctgtccccaggggctgggctagggcccaccagctctgatatcgagcctgctgcgggggcctgaggagggggaccccgaccgtctggggttttcagcccacggcaaggggccggtgcaccaggagcttggttagtttggggagggggttgcaggcctgtgaacaggatcaaagaggccttccctgctgtgtcccacctgcccagttccttgtgctgtctggaggctccgccctgccccacctgacctgctggctcactacagagctgcaagcccctgacaatgggatccgggaaaggagaggtggccggcacgcctgggaactgggaaatccctttcctggattcactgggagcaccgggaggtggctgagaaccctacttctgtgaggggagcagtgaggcagggaaaccctaggtttggggatggataagcaggggcaggagagcagagcttgcaggcaggagcccaggttctagtcttgggaaggcctgggttctgagcaggcccatctgtccggcaggatgtcggaggagatcatcacgccggtgtactgcactggggtgtcagcccaagtgcagaagcagcgggccagggagctgggcctgggccgccatgagaatgccatcaagtacctgggccaggattatgagcagctgcgggtgcgatgcctgcagagtgggaccctcttccgtgatgaggccttccccccggtaccccagagcctgggttacaaggacctgggtcccaattcctccaagacctatggcatcaagtggaagcgtcccacggtgagaggggccatcctgggtgggactcggctaagccagatcctggatgaggagtagggatgggactccatgtccctggtggggaatggggtctggggtggcctggtgccaatttctgggaggggctggccgaggaacaggactctgggtctctcgtaggaactgctgtcaaacccccagttcattgtggatggagctacccgcacagacatctgccagggagcactgggtaggcccccagggcgtcgggtcccgggtattttttccacagtagttccccattcccgctccttcaggctctgccccaacccctccctcttgcaagcccaggcaggatctggctatcagcgctggggctggtttgcccagattcctgggtcttttctgcaagctgaggggagttaagtggcaccctggccaaggaaccccagattctccctagcacccgcttccccccccggggcaggttggtagagcaggctaatgtgcatccctcctgccccaggggactgctggctcttggcggccatcgcctccctcactctcaacgacaccctcctgcaccgagtggttccgcacggccagagcttccagaatggctatgccggcatcttccatttccaggtgagggctcccctggggaggaggggcagcaggcactgggggagatgcggaaggatgacccacaatacctgcagttagggccacaccctgtggggccagccctccctctagcaggtatttgacctctcagtgccatctcgggtctgtcatgtgtgaagtgactgggctgggcaggtatttcggctggcagttttcctaggtggttgtatgtatcaggtggaaagtgcttgaaagaacagaaagacttttgtgttatatcctgtgggacaaattccactcctcccggaggtcggtctcagttgccccatctgagaaaggagtgttcgctggggaaaacagatcagcacgtgtggccttctccacgtgtcaagcctcctatcccccaactcctcctgcgctttggcaaggtctgactgagcccagcagaaaagaaagactcgggattaagtctacgtaaaccagcttttcctgacggtgtgcccagggcccatttttcaagtcacaccaatcaattctcaatgagctgcctttgggagggacatgcccagcaaccctggatgagactctccagccttggaggccccagccctgcccgaaggactcttgggtgttccctccttctgcctggttagagagccccttaccctactctgtccttgcccgccttgcgcgggtggaggtggccctcggaacccagggtgcggaacccacagtgcggatccactttggcccagcgccacacccacctgctccagtctgcaggggcgcagtctcgcccccttccctcgctcctccaatccgctcctccctggcctccgattggccagttcagtacccgccacccacactctccgcaacctgggctcctagggccgcctccaccccgccccgccccccgttgtcctggccccgacccctcagatggtacctcgagtccttggtcgcttctgaccccagacgccttcggccccgaccctgccctgggaaacgtggcctttgtggcatctcagaaacaaagcccgtgattgtgagaaccagtcctgcccatcttgtggttgtaggatctggatgccacattttcactgctcatccaatgacacaggtgcccctaacccccttgaatagggagggaagagccagggggccatggcctaaaagggggctagttccggaaagcccaggccccagagcttttccacctctccgtgcctgaggaggaaccctgtttgttcagtgactccctaaaggctttgcctgtgctcttgtttaagtcttccgtgaagaaggcaccgctgctcctttttatggatagggaaactgaggctcagaggcgataacttttccaggatcatgtagctagtatgtctcgagcatacatgtacatatcaagtatacacatgtctatatgtggtatgcatgtattagtatacagcaaatatgcaggtatctagtatacattgtacaggcaaaggaaagcatccccttagccctctgaaggttcactgaaaaatcaactcacaaaaggaggttagtaggagaaatggcatacaaattgattagcctgcagcgtggggtcgggaaccacagagtgttcaccccagccccacaatgggtacagaagcctatataccatcctgaggttacaggaagaatgggggctcgaacatggccaaaaccagtttctggtggtaaatcaggttatagtggcaagacagactatggaagggggagaaaagggggcctgggtagcaaaggcagtcttgttatgtagatgaaacctcacaggtagcagccctcagagggaatagatggtaattgtttcgttcagacctttaaagggtgtcaggctctcagtctgacaagggaaggccttagagaaagcctggctacatcaatgcagattttctctacagatgcaaatctcccccacaaaagacagtattacagggctacttctgtttgcagaccctctgaacagctatctcaaaatatgttgaagaagtatatttcagggtgaaatactttgatttccttcaatacctagatacatgtatctagtatatctgtagcatacatgtatctagaggtacacatgcatctagtatgtatctagtatatgtgatttagtatacatgcatctactatgtatctggtatacctgacctagtatacatctagtatgtatctaatttacatgatttagtctatgtgtatctagtatgtatctgggatgtagaatcctgcatctaggaaggtaggggtaaggatggagctcaggtccgggggattccaaagcaggtactcaccgtgcccctcccccacagctgtggcaatttggggagtgggtggacgtggtcgtggatgacctgctgcccatcaaggacgggaagctagtgttcgtgcactctgccgaaggcaacgagttctggagcgccctgcttgagaaggcctatgccaagtgagtagcggctgagggggcaactccagcttccagctccccctaggggtgggggctcatgactgtcttctcagagggtcctgcttgatgccagagtgctgacctggagctgcccacagggtaaatggcagctacgaggccctgtcagggggcagcacctcagagggctttgaggacttcacaggcggggttaccgagtggtacgagttgcgcaaggctcccagtgacctctaccagatcatcctcaaggcgctggagcggggctccctgctgggctgctccatagacgtgagtgtgcccggccccgatgctttggtaccctggaaccctggtatcctgacctgtcacattttctaaaatccccacccaggctccgctccagaccctgtcctgcacttaagcttcatctctggatgcataccctgcctcatccatcacttccaccccccatgcctggtgtcgctcctgtcctcacctacccactcctcccccaaaacttcacacctcagctctttcctgtgcttgttttcccgtctaccatgctgtttccctcattcctgtcatctcaatccatgccatcctctgtccagttcaccagcctcagatttcatctcctggtctcagttcccacccatccctagcctcaatcccacactcactccattcccacccttccctgctcctctgttcccacactcaactccgctccccagtcctcaacgccagacttgaccccagtatcactgccatccgcagctctaaccccagctcccattcccatttctaactgactcttctgtcctcacgtccttctccgtgaggcccactgagggctgtgtggctctggtgggctgtgcacggctgtgtgtgtgcacatgcatgttcgcacaggttctggtcagccctggccagtagcagtgtcagcggagtgcctgggctcccctgtcccagtggcagcattggtggggtacccaggctacccctctccaaaagagcagcatctatatgtgggggtgtctataggtgggatcggggtccctgcttgcttctcctagcaactgttgtatgtgcaagtgggaacgtccaagaccctgagtgctgggggctcatctgatagggcggggggacctagccactgaccacagtgtgtgcctctttctgcagatctccagcgttctagacatggaggccatcactttcaagaagttggtgaagggccatgcctactctgtgaccggggccaagcaggtactgccctgggtggggccttccctgaagggcggttcctgccccctggcctgtccttgcctctctggcacctgaccagggctgtggaaggtgctggctcctcctttcccctcctgcagcaccttatctctcttctggggacacccatctgagatgcctatcatgtcctgccctgactgactgtagttcatgtgtgcagctgcctgcctgggctgtgaattccaagaggacaggcttcatctgggtgctgagcagggcttggagaggatgagggtatgggaggcggagtgttaaagtgcgtgcatgggccaggtgcactggctcacacctgtaatcccaacactttgggaggctgaggtgggcagatcacctgaggtcaggagttcgagaccagcctggccaacatggtgaaactctgtctctactaaaaatacaaaaactacctgggtgtggtggcaggtgcctgtaattccagctatttgggaggctgaggcaagagaattgaattgcttgaacccaggaggcggaggttgcagtgagctgagatcgcaccactgcactccagcctgggtgacagagcaa

SEQ ID NO: 96732 - DNA, 17527 bp, Homo sapiens
  misc_feature (1)...(17527): n = A,T,C or G
cgaactcctgacctcaggtgacaccttggcctcccaaagtgctgggattacaggtgtgagccaccgtgctcggccaatcctccttgtttcttaaggaggtacagctatgggtaaatccatagctgtcttgggatgacagttgccttgatagaggtgttgtcctgtctttccctgacaacaccctgcagtttaatttaattaagttaaattaagcagctgattgcttaagagttttcaacaatgatgggggcagggcataaattgctcttcaaagtaatccaatcaaatgtgctcctttgaaggaatagtttctgatctcagtgttttgcatttgtcctaatcctaggaggcctcttctcacctgtcttattcaccattccctcttataaactagcggttctccagttctgcctttcactttaaccttcattgtttaattgcttttcattgagagcacccatgatcttgcaaatgggaggagattagaagctacctgttttactgcctgcttctctcccctggcaaaatctcagagaacagggtaaagacaatggcaagttcttgctgagtgacacctggacgctaggacctaagcactcagtgggtggggaagtgtgggagaagccaaattcctctccactggcctctcttgaaatgcaaagtactgggacgagggtgaccagggctccagtctcctcagtgcaccatgcctaaggtagcacctttgtcctgcaagttgggactgaatagcggaagagaaactgctactctcagctgtacttgcctactatcttagattaaacaacaggtagctggaggcaggatgagaaacgctgaccttttcctcatcccaaagataaagccttcttttttatttttattttttattttgagacggagtctcactctgtcgcccaggctggagtgcagtggcaggatctcatctgactgcaccctccgcctcccgggttcaagctattcttctgcctcagcctcctgggtagctgggactacaggagtgcgcaaccaggcccggctaattttcatatttttagtagagacggggtttcaccattgttgggaacaagccccccaaaatctggccataaactggccccaaaactggccataaacaaaatctctgcagcactgtgacatgttcataatggccctaacgcctgcactggaaggttgtgggtttacgggaatgagggcaaggaacacctggcccgcccagggcagaaaaccgcttaaaggcattcctaaaccacaaacaatagcatgagcaatctgtgccttaaggacatgctcctgctgcagttaactagcccaacctattcctttaattcggcccatctctttgttttccataagggatacttttagttaatttaatatctatagaaacaatgctaatgactggcttgctgttaataaatacgtgggtaaatctctgttcgggcctctcagctctgaaggctgtgagacccctgatttcccacttcacacctctatatttctgtgtgtgtgtctttaattcctctagcgctgctggattagggtctcccccaccgagctggtctcagcacaccatattggccaggctggtctcaaactcttgacctcatgatccacccgcctcggcctcccaaagtgctgggattacaggtgtgagccactgcacctggccagataaagccttctgactaagagctgcagggagagggagccctgtctggcagcagcaatctgcagcagattctctgccttgctgatctgatagggaggagagtggtggcagtcttggttcagatacctgagatgcttgcttttcctacagaatattcatagattttattgaataagtgtttctgcattttcctgttgcccttatgacaatttctagagtttttgtttgtttgtttgtttgtttttgagacaggatctgcagccttgacctcctaggctcaggcaatcctcctgcctcagcctcttgagtagctgggaccataggtgcatgctaccatgcccagttattttttaatttatctgtagagacggggtctccccatattgtcctggctggtctcaaattcctcggctcaagcaattcttccacctgagccttccaaagtggtgggattataggtatgagccactgtgaccagctcgtttctagaggttttaagtagttgggtctttatagttttcacaagtcttactggagaataggtcatggagctcctcatgctttcatgctggaatttggtattctacttatgtctgttttttttgttttgttttgttttttgtgatggagtctcactctgttgcccaggctagagtgtagtggtacaatctcagctcactgcaatctctgcctcccaggttcaagtgattctcctgcctcagtctcccgagtagctggaattacaggcatgtgccaccatgcccagctaattttttgtatttgtagtagaaatggggttttaccatgttgcccagtctggtcttcaattcctgacctcaggtgatctacctgccttggcctcccaaagtgctgggattacaggcatgagccaatgcctagcgtgttatagtctttttgttaaagttctgaaaacattgatttttaccatttctgccagtattcttatggcattaatggatgtaaaccaaaaataaaattctaagccccccaaccacctgaatggattcctcctcttggccaagggcattccaaaataaacctgaaacattatttcagaccatcatgggaatgggtggtgggacaggccacattataccttcctctcgttgaaattcaggcacaactgaccagcattaacattaaaacagagaccttgagacggagagagcagactctgtagcaataagataccaacatgacagattgcagtcacaaaataaataaaaaggccgagcgtggtggctcatgtctgtaatcccagcactttgggaggctgaggcatgtggatcacctgaggttaggagttcgagaccagcttgaccaacatggtgaaactccatctctactaaaaatacaaaaaattagccaggcgtggtggtgcatgtctgtaatcccagctacttgggaggctgagacaggagaattgcttgaacccaggagttggaggttgcagtgagccaagcttgtgccactgcactccagcctgggcaacagagtgagactctgtctcaaaaaaaaaaaaaataaataaataaaaatattttatcccaaaatatattgcttcgacatattttgaaatgggcctgcaaaactgtctctttaagtctgataaaaacatttacaatctattctctttgaagcctgcataatagaacctgaatttcatctgcataataagaaccccttattttaaccccagacactcccttctattgattccaaggctttagataaactctcaaccaataaccaatcagaaaatctttgagtccaccgataacctggaatgcacccccttcctgctttgagtcatcccacctttccagatggaaccaatgtacatcttttgtttttttttttgagacagagtctcaccctgttgcccaggctggagtgcaatggagcgattttcgctcactgcaacatctgcctcccagattcaaacgattctcctgcctcagcctcccgagtagctgggattacaagtgcccaccacgacgctcatctaatttttgttttattagtagagacggggtttcaccatgttggccaggccggtctcgaactcctgacctcgtgatccacccgctgcagcctcccagagtgctgggattacaggcttaagccaccacgcatggtggaaccaatatacatcttacatatattgactgatgtctaaaatgtgtaaaaccaagctgtaaccctaccaccttggcacaggatctcctctcgctgtgtcacaggccatggtcaatcacatttgactcacatttcaaatattttacaaagtttcacactttttgttgacttggaggacagaattttttagaggtcctgactttcccattcctactgatattgtcttacccatataatactcacagaagtctttacctttcttttcatctaggatgttttcgctttttggtattacaggcaatgcttctgcgtatatttttgtctatgtagctgggggtacatgtgctcacatttctctagggtatatgtttaggaatgacattggtaggccgcagggtttgcatatctttttttttttttttttgagacagagtctcgctctgtagcccaggctggagtgcagcagcgtgatctcagctcactgcaagctccacctcccgggttcacgccattctcctgcctcagcctcccgagtagctgggactacaggtgcccaccaccgcgcgcggctaattttttgtatttttagtagagatggggtttcaccatggtctcaaactcctgacctcggatgatctacctgcctcagcctcccaaggtgttggaattacagacgtgagccatcgtgcctggcctgcacttccctaattattaatgacattatatgtcctataaccccactggccatttgtatactcttctttttttttgttgttttttgagacagagtctcgctctgtcacccagcctggggtgcagtgacgcaatctcggctcactgcaacgtcggccacgtgggttcaagcaattctctgcctcggcctcccaagtagctgggattacaggtgcctgccactacgcccggctaatttgttttgtattttggccaggctgatcttgaactcctgacctcatgatccatccgcctcagcctcccaaagtgctgggattacaggcatgagccactgcgccctgctgtatattcttcttttagaagtacggcgtcaattcttctgctcatttttctattatctttttcttagtaagttgtctttttgtgtatattttgggtatgagttttctgcctgttagatgtatttcaattatcttctcccactctgaagctttctttctactccgttaatggtatctttttctctaattttgaatttctgatatataggaattgaaaaaataatagagagaattcttgcctgatctaggagtgtctgcgcagctgccaatttgcatctggcatctttcacccagcattcccttatgtgaacatcttacaaaataataaagaattgggtgggcatccttttttcttttctttttttttttttttgagacggagtctcgctctgtcgcccaggctggagtgcagtggcacgatctcggttcactgaaagctccgcctgccaggttcacgccattctcctgcctcagcctccagagcctgggactacaggtgccccccacaatgcccggctaattttttgtatttttagtagagacggggtttcactgtgttagccaggatggtctcgatctcctgacctcgtgatctgcccgcctcggcctcccaaagtgctgggattacaggcatgagccaccgcgcccggccttttttttttttttttttttttttgagacggagttgccacctcctcctaccgggttcaagcgattctcctgcttcagcctccccagtagctgggattacaggcatgtgccaccacgcccgggacatgttggtctccatgttggtcaggctggtctgcaactcctgacctcaggtgatccgcccgccttgggcctccgaaaatgttgggattacaggcataagtgaccgcgcctggcaccccgtctttttttttgtttttttttagacggagtcttgctcttgtcgcccaggctggagtacgatgccatgatctcagctcactgcaaccaatgcctcatgttatcagtgtctgtgaaggagaaagcagagagaagcaatagggcaactgatgggcttgagaacagcagaaccccaaaacacacaactgggattccctagcgagcacagcaggccaatgtgaggagtggctgaaactcggagcagttgtgccctgcctaatggtgagtgaaacgggcctgcagaaggtctacgagtctgcagcagtctagtccctgagagcagaactccccttctgtgacagtgccctacaatgaggagaaactactcaacagaatcaaaattgagcatgatagggacaagggagctcaaaaaccgagcaggggaaagctcagaaagcaagccacatgtttttgcagtatactacatgaaaacagcagagatctgggaaggtacaaaggccatcctaaaccatccctccttccgaaaggtcacattaaaaatgatcaacagacagtggttcatgcctgtaatcccagcactttgggaggcagaggtgggcagatcacctgaggtgaggagttcgagaccagcctcaccaacatggtgaaaccccgtctgctactaaatttttttttgtnnnnnnnnnnnnnnnnnnnnnnnnnnnnnnnnnnnnnnnnnnnnnnnnnnnnnnnnnnnnnnnnnnnnnnnnnnnnnnnnnnnnnnnnnnnnnnnnnnnnnnnnnnnnnnnnnnagtaagggtatccctcactgttagaataagttgtatcagaaaaatgggatgaaaaagagaacaactctataagaaaatgaaaacatgccagcaagaggcccataaaaacgaaccaggagactgctcctgctattccaaaacaagctaaacgtattaagaaaatgacacaagtcatgcaagaacaatgtaaacaataattagaaaaattcagaaaaaagatagaaatcaggaataaatttagaaataaaagaagtattttaggaattaaggctaagctagatggattagagtgaataacaacaaacaataatgctttaagacaaatagaaggtaaaacgaagaaaagcaactttaattgttttttagagacagggtcttgctttgtcgcccaggctagagggcagtatgcacaatcataggtctgtgcagccaggaacccaacttcccgggctcaagtgttactcctgcttcagcctccccagtagctgagactacaggtgtgagccagataatttttcactttaaaaaatttttttgtagagacttgttttcaccatgttgcccaggctggtctcaaactcctgagctcaagcaatcctcctgattcagcctcccagaaaagtttttttaatttattttttatttttattttttttatttttattttttgagatggagtctcgnnnnnnnnnnnnnnnnnnnnnnnnnnnnnnnnnnnnnnnnnnnnnnnnnnnnnnnnnnnnnnnnnnnnnnnnnnnnnnnnnnnnnnnnnnnnnnnnnnnnnnnnnnnnnnnnnnnnnnnnnnnnnnnnnnnnnnnnnnnnnnnnnnnnnnnnnnnnnnnnnnnnnnnnnnnnnnnnnnnnnnnnnnnnnnnnnnnnnnnnnnnnnnnnnnnnnnnnnnnnnnnnnnnnnnnnnnnnnnnnnnnnnnnnnnnnnnnnnnnnnnnnnnnnnnnnnnnnnnnnnnnnnnnnnnnnnnnnnnnnnnnnnnnnnnnnnnnnnnnnnnnnnnnnnnnnnnnnnnnnnnnnnnnnnnnnnnnnnnnnnnnnnnnnnnnnnnnnnnntttaaacgaaaaaacgggctgggcgccgtggttcacgcctgtaatcccagcactttgggaggcctaggcaggcagatcacgaggtcaggagatcgagaccatcctggctaacatggtgaaaccccgtctctactaaaaatacagaaaaatagccgggcatggtggcgggtgcctgtagttccagctactcgggaggctggggcaggagaatggcatgaacccgggaggcggagcttgcagtgagctgagatcacgccactgcactccagcctgggcaacagagcaagactccgtctcaaaaaaaaaaaaaagaaagaaaaaatgggcctggcacagtggcttacatctgtaatcccagcactttgggaggctaaggtgagcggatcacttgaaatcaggaattcaaaaccagcctgacaatgtagtaaaaccccatctctactaaaaatacaaaaattagccaggcatggtggcgggtgcctttagtctcagctactcaggaggctgaggcaggagaatcgcttgaacctgggaggcaaatgttgcagtgagccgagatcatgccactgtactccagcctcggcaatgaagcaagactctgtcttaataataataaaaaaaaaaaaaaaaaaaaaaaagagggaaggcgcagtggctcatgcctgtaatcccagcattttgggaggctgcagcgggtggatcacctaaggtcaggagtcgagaccagcctagctaacatggtgaaaccctgtctctactaaaaatacaaaaatagccgggtgtggtggtaggcacctgtaatcccaggtacttgggaggctgaggcaggagaatcacttaaaccggggaggcagaggttgcagtgagtagaaatctcgccactgcactccagcctgggtgacagagcaagactccatctcaaaagaaaagaaaagaaaaggggccgggggtggtggctcacccctgtaatcccagcactttgggaggccgaggcgggcggatcatgaggtcagaagttccagaccagcctgaccaacatggtaaaaccccgtctctactaaaaatacaaaaattagctgggtgtggtggtgtgcgcctgtaatcccagttactcaggatgctgaggcagaggaatcgcttgaacctggaagatggaggttgcagtgagccgagattgtgccactgcactccagcctgggcgacagagtgagactcggtgtcaaaaaaaaaaaaaaaaaaggaaaaaaaaaacaaaaaatgattcaagacaaagtgcaaaatattgaagatgggtaaaaccgaacagtaaaataagaggaatccccaaaaaagaagactttcaaaaaggtttgaaactacaagctgaaagaacataatgcatgcccagaactatcactgctaagatatgttctaataaaatattaaggctttaggctgggtgagtggctcacacctttaatcccagcactttgggaggccgatgcaggtggatcacctgaggtcaggagttcgagaccagcctggccaacatggcgaaactctgtctctactaaaaatacaaaaattagctgggcatgttggcgcatgcctataatcccagctactcaggaggctgaggcaggagaatggcttgaacccaggaggtggatgttgcagtgagccgagattgcgacactgcactccagcctgggcaacagagtgagatgccatctcaaaaaaacaaaaaacaaaaaaacacacaaaaaaagttatttgcagaaatttgtggctggcctgcaggtggtaatttgcagactcatgctctgtagggaaggaacatgccctcctggttcctacttctcattagctggtgctctgatttacatgtttttgtaccctccaaaaattcatattggaatttattccctaatgccacagaattggaaggagtggcctttgggagatgattgagtaatgaaggctttgcctttgtgaattgtattaagttcccttataaaatggcttgatggggggggagttcactgcttttttgcccttcttccatatgaacacccagcattcctttccctggaagatgcagcatcaagccaccctcttaaaagcagagagcagccctcaccagacagccagtcctgctgatgtcttttttttttttttttgagackgagtctcgctctgtcgcccaggctatagtgcagtggcatgatctcggctcactgcaagctccgcctcccgggttcacaccattctcctgcctcagcctccagagtagctgggactacaggcracckccatcacgccctgctaatttttctatttttagtagagacggggtttcaccgtgttagccaggatggtctcaaactcctgaccttgtgatctgcccgcctaggcctcccaaagtgtgggattacaggcgtgagccaccgcgcccagcctggtttcgatcccttgacctcgtgatccgcttgcctcagcctcccaaggtgctgggattacaggtgcgaaccactgtgcctggctgagttttgactaatatagataataacagaaatttggagtgtgaaggaactgttctgaacattcttccatgtgcatttggtgggctcagtatttttgtttcctgtgatatctggttagttctatatttccaaaattagggaataaggaggtttcgctaatctgctgatgtgcagtgtggtatttctcacgtttacttgactatgtggaaacacttttctagagctttttactgagacttgcaacaccccagtcactctggaagtcatcaatggggaagaaatggagggaaccttggtgttctcctttcccacaaggaaaatcaggtgcacatacaacctatgaggagacatggaggtaagaaggattaatatttgaagagtcggttattttgtagaattttcttcaattttggtttgtctgattttatctattttttttattattactatttttttgagatggagtcttgctctgtcacccaggctggagtgcagtggcatgatcttggctcactgcaacttctgtctcctgggttcaaatgattctccggcctcaacctcccaggtagctggaattacaggtgtgtgccaccatacctggctaattttttgtatttttagtagacacggggtttcaccatgttggcctggctggtcttgaactcctgacctcaggtgatctgcctgccacagcctcccaaagttttgggattacaggcgtgagccatggcgtccggccttcttttttcttttttttttttttttgagacaaagtctcactttgtcatccagggtggagtgcagtgtcatgatcacagctcactgcagctacaacctcccaggcccaagtgatcctcccacttcagcctcttgagtagctgggactacaggggcatgccaccacactaggctaatttaaaatattttttgtaaagatagaatgttgctatgttgtccagactggtctcaaactcctggggtcaagcaatcctcctgccttggccttccaaagtgctgtgattacaagcatgagccaccatgcccagccttgttttgttttttgagacagggtcttgctgtcacccaggctgaagcggcatgaacatagcttactgaagccttgatctccggggctccagtgatcctcctgcttcagcctctcaagtagcggagactacaggtgtcagaggcatgtgaacgacaacaactccatcctgaataggaactgggtaaaacgaggttgaaacctgtgagctgcattcccatacagttaaggcattttaagtcacagcgtgttgggaattggtgggttcttggtctcactgacttcaagaatgaaaccgcagacccttgcggtgagtgttacagttcttaaaggtggcgtgtctggagtttgctccttctgatgtttggatgtgttcggagtttcttccttctggtggggttcgtggtctcgctggctcgggagtgaagcggaggaccttcgcggtgagtgttaacagctcttaaggaggcgcgtctggagttgttcgttcctcccggtaggtttgtggtctcgctggcttcaggagtgaagctgcagaccttcgtggtgtgtgttacagctcataaaggcagcgtggacccaaagagtgaacagcagcaagatttattgccaagagcgaaagaacaaactctccagtgtggaaggagaccccagcgggttgccactgctggctctggcagcctgcctttattttcttatctggccctacccacatcctgctgattggttcattttacagagaggggagaggtctgttttgacagtgtgctgattggtgtctttataatccctgagctagacacaaaggttctccacgtccccactagattagctagatacagagtgtccacacaaaggttctccaagtccccaccagagtagttagatacagagtgtcaactggtgcattcacaaaccctgagctagacacagggtgctgattggtgtgtttacaaaccttgagctagatacagactgccgattggtgtatttacaatcccttagctagacataaagattctccaagtccccaacagtctcaggagcccagctggcttcacccagtgaatcctgcacccgggcggcagggggagctgcctgccagtccccggccgtgcgcccgcactcctcagcccttgcgtggtcgatgggactgggcgccttggagcagggggcggcgctcgtcggggaggctggggccgcacagcagcccacggaggagggggaggctcaggcatggcgggctgcaggtcccgagccctgccctgcggggaggcagctaaggcccggcgagaaatcgagtgcagcgcccgtgggccggcactgctgggggacccagcacaccctccgcagccgctggccggggtgctaagcccctcattgcccagggctggcagggccggccggccggccgctccgagtgcggggcccgccaagcccaggcccacccagaactccagctggcccgcaagcgccgtgcgcagcctcggttcccgctcgcgcctctccctccacacctccctgcaagctgaaggagccggctccggccttggccagcccagaagggggctcccacagtgcagcggtgggctgaagggctcctcaagcgcggccagagtgggcgccaaggccgaggaggcgccgagagcgagggagggcgcacgctgtcacctctcaacaggatgagatagaaggtcggcacaaaatactggtcataaagaccttactgataaaacaggttgcggtaaaggagccggccaaaacccaccaaaaccaaaatggcaatgagtcctcactactacactcccaccagcgccatgacagtttgcaaatgccatggcaacatcaggaagttatcctatatggtctaaaaaggggaggcatgaataatccaccccttgtatagcatatcatcaagaaataaccataaagatgggcaaccagcagtcctcgggctgctctgtcaatggagtagccattcttttattcttttactttcttaataaacttgctggctgggggcggtggctcatgcctgtaatcccagcactttgggaggctgaggcaggtgggtcacgaggtcaggagtgcaagaccagcctggccaagatgttgaaaccccgtctctactaaaaatacaaaaattagccgggcgtggtggcgggcgcctgtaatcgcagctacttgggaggctaaggcagagaattgcttgaacccgggaggcacaggttgctgtgagccaagactgcgccactgcaatccagcctgggcaacagagcgagactccatctcaaataaataaataaataaaataaaaaataataaacttgctttcactttgcactgcggactcatcctgaattctttcttgcgtgagatccaggaaccctctcttggggtcaggatccagacccctttcctgtaacacaggcacttgtcaccaggcccggctgatttttgattttttgtagagatggggttttaccctgttgcccggtctagttttgaactccttggctcaagggatcctccctacttggcctcccaaagtgctgggattggtggcatgagccactgtgcctggccttgtctgatatttatgactagattgaggtaatggattttcaataattttgtggcaataccacagaagtgatgtgcctttctcaatggatcctattagtagatacctaatgttactatattttatatgtggtgatgttaactttgatcacttgtttaaagtggtgcctgccaggattctccactgtaaactattttttcctttgtaattactaaacattttatttttattttttaatttccttttgagagggagtctcgcccagtcgcccaggctggagtgcagtggcacgatcttggctcactgcatctcctgcctcccgggttcaaatgattctggtacctcagcctctggagtagctgggattacaggcacgcaccaccacacccggctaattttattttatttatttatttatttattttgagacggagtctcaccctgtcgcctaggctggagtgcaatggcgcgatcttagctcactgcaacctccgcctcccaggttcaagcgattctcctgcctcagccaccccaagtagctggaattacaggcgcctgccaccacgcccggctaattttttgtatctttagtatagacggggtttcaccatgttggccaggctggtctcgaactcctgacctcaggtgatccacccgcctcggcctcctaaagcgctggaattacaggcgtgagtcaccgtgcccggcctaattactaaacattttagtagagatgttttgaaactttgcatatatcctgtttcggcttcaagttctgcctactaattttagcattcatccgtggatgttggggaaggccaacttttactttctcaatctgagcaaaatttcactgttttaaggagcaaaacgagcagaattattggacaggaagaatggtaggagagagtagagacctaggcaagggccgctcctgtaaaaattaggtaagtgaaaactagtaataataagtacactcgcggctgggcgcagtggctcacgcttgtaatccagcacttcgggaggccgaggtgggcggatcacgaggtcaggagatggaggccacagtgaaaccccatctctactaaaaatataaaaaaaaattagccgggcgtggtggcgggcgcctgtagtcccagccacccgggaggctgaggcaggagaatggtgtgaacccgggaggcggagcttgcagtgagctgagatcgtgccactgcactccagcctgggcgacagagcgagactccgtctcaaaaaaaaaaaaaaaaaaaaaaaaaaaaaaaaaaaaaagtaagtacactcgcactacgaacagaaggatatcccgagcagctctgaaagggctttagcaatcaggcgccgggtcggcttcccggttgccccggagacagggtccttccttgttcggcgccgccatcttgtgtcaccagcccttgcccaatgaacggctgctcagtggcgggagggcgggctaccgcgcccgggccctacccgccctggcgcactgctcttcccggtcatggaggcgccagccgccggcttgtttctgctcctgttgcttgggacttgggccccggcgccgggcagcgcctcctccgaggcaccgccgctgatcaatgaggacgtgaagcgcacagtggacctaagcagccacctggctaaggtgacggccgaggtggtcctggcgcacctgggcggcggctccacgtcccgagctacctctttcctgctggctttggagcctgagctcgaggcccggctggcgcacctgggcgtgcaggtgagtgtgggcgacccctcgccgccgctcccgggacccttcccgcctcccttcctggcggtcccccgactccgcccgcgcccctctaggcctcaggaaatgcggagacccgggcggcgggcggggcacagggggtccgtgggattgcctcggggcccgcgaggagtcctgggtggccaggggccccggcgcctccgctgcccccggtgcgcgcccgccctcctgcctgggccacgtcagcaccggcctgcccccgcgcgggtcgctgctcacgtgggcagctgctgggatccgcggccgaccagcctcggagcttgcccctgtttgggccgttctcggcaccgctcgggagacctcgggccggtagaacgcacctcccttccgtaaggcgagcgcggcagcccctcggcccggtgccagcgggcgccagacttcatttctcacggcccgacgaggtggctcaagtagaggacaaataaatgaattaaagtgaatttcattctcttaattcagtatctggtccgttgtaggtgcttctttctagacatagagaaccatcagaaatgtaacaggtttcgcatttttaagttggtaatcacttgaaatccctatgaatgtgatgcattttaaggttcctagtgaacgctttctaaatgttaaaactctttttaaagttagttttaaaactcctgcacgtaatataagttctcttatgctgtacagaaaaggaaagtccaattttctcccttccccctgctgcttctcattcttacacctcggcaataaatggctgtgtttggcttaaatgtttccaggtatttcagtgatcaccaaagaaaatgttgggtttgggagtaaagggaatgtacatacacagaggtttggtttttattactattgttgttaaacaatttcattaaatgattacctaattatttgttgagagaatagtcattatagtgtcacatttcttctaagcacacttcgttctctgactgaatatggagctataaagatgggtttatagagattacgtttctgaaatgactcctattttctttcatgcgttgtccatgatgaaataaagttttactcaaaggcttgtggaaagatagatcaaaacttcatgtaaatttgccttgccatctttgaatgtcttgaatgttaaatcccgttctttatagaagccagttgtgatttaatgagcttgttacagtataagtggaccacagcaggagctcggctatcctgccatcatgcctgcgagctaggttaatgtacttattttatcttgtttttattttttctcccaactttattgaggtataattggtatacaaaaaactgcctattattagtatattcaaaatacgtatacactggtgtaaccattaccacaatccgggtaataaacatatctgtcacctccagaagtttccttttgtcctttagtttgtttgtttctgtggtaagatactttcttactgggactctactgtgtgtcagatattatggtgggtattttaaatatattctcatttagccctcatagcaaccatttaaggtataaatcctcatatagcaggcaaggaggctgtagtctgtcaggttaagttatttagccccttacatgcggtcttacagtgcagagtaagtcagggctccagcttattccgtaagttgtgtgttctcacactgtataatgttgcctcttctggcttttatggctgtgagataggattgtattgggtataagacttgcagtcacattaacagatttatttaaaatcattttcaattttgtagtccaagacaccagttaaatggatatatgtgctattttgtactcctatcccagtgggaaacaactggatgataaacttaacaaggagatgtatattttccaacagttgtgttggaaactgatgaggttgctgaaatgtttttcagtgggttcttttctttttc

SEQ ID NO: 96733 - DNA, 176307 bp, Homo sapiens
gacacaattttaaatatgtatgcaccaaacaacatagtcacaaagcatgtaaaacaaaaaccaatatgactgaaaggaggaaaaatagacaattccacaataccccactctcaattgatttttaaaaaataaaaaatcgaatataaaaattttacatcaaataaaacagattaatagacaattgtagaatacttctcccccaagaaaagtagaatattcattctctttaagtgccatcaaacaaataccaggaaataatatattctgagccacaaaatgaatgtcgacaaatttaaaataattaaaattgtacagagtgcattctctgaccataatgaaatccaactagaaattagttatagaaagataaaagaaatctgaaaacacttgaaaattaaactatacacatctaaatagctcatgaataaaacagcaaatctcaagggaaaaatacattgaactgaacaaaaatttaaaatacaacacagtaaaattaatgggacacagctaaagcaatgccaagagagaaatttatatcactaaatgcctatgctagaaaagagaaaattttctctaataatctaagcttccatctcagaaatatagaaaaagaagataaaaatatcccaaagcaaacacaaggaaataaattaaaaaacagaaatccctaaaattgaaaacaagaaaatcaacaaagcaaagagctggttcttttaaaagatcaacaaatagaattaatagacctccagcaagactgacaagagaatagacaaaaattaccgatatcaaaaatgaaatggatatcaccactgacacagcagaatcaagggataataagaaaataatatagacaactctagacaaaatggaccaattccttaaaaaaaaaaatacaaactaccaaaactcactgaatgcaaaatagatacttccaatagctctatatctgttaaggaaactgaatttgttattttaaaacttccaaaaaagacatttccagacccagatgatttcactggggaatcctacaatttgtttaaagaaaaattaattcaaattctgtaaatattttccagaagataaagtagaataggttatatctcaaattgttttatgaagctggtattaccctgatatcaaaaccaggaaaaacagtataaaaaattatagacccaaagccttcatgaatataaatgcaaaagttattaacaaaatattagaaaacaaaattcatcaattaaaaaattatacatgatggccaaatggagtctatttcaggtatgcaaagctaggtcaagatctgaaaatcaattaatgtaatagaccacattaactagctaaagcagaaaaattacatgatcatatcaattaatgcattaattaaattcaaatggaattaatgcaggaaaaaactaattcaaaatccattcacgataaaaaatatctcagtaaaatagaaatacaagagaactccctcaactcaaatcatctacatacaaatctacatacaaatcatctacatacaactcaaatcatctacatacaatatacagctaacattatacttattagtgacagacttaatattttccccctgagactgagaacaagacaatgatgttcactctcatcacttttattcaacatagccttaaaagtttcagtgagtgcaataaggcaagaaaataaaataataggcatacatattagaaaggaagaaataataccgtttctatttgcaggtgacatgattgtctttgtagaaaatccaaggaatctacaatatactcctagaactaatgagcaagtcaccaaaattgcagaatacaagataaacatacagaaatttattctattttggtataccagccagaacatatgtgcagcaagcaaaatgtgtacaggactcatatgctaaaaactacacgatgttgataacataaatgaaagaggacctacatagatgaagagacacactatgtccattgattggactattcaaatagtaaagatgtccatttttcccaaattagtatatgaatttaatacaatcactatcaaaatccaaaaagttttttctaggtacagacaagattattatacaatttatatgaaaaagcatgaaaccaagaatagttaaaacaattttgaaaaaaaataaagtggaaggaatctatctacctgattttaagatttatatgattatagtcatcaagactggtactggcaggggtataaacaatggagaagaatccagaatccagaaatagatccacacaaatatgcaactaatttttttttttacaaagttacaagaacaattcaatggaggaaggacagtcataaaacaagtggttctagtacaattgaaaatccaaataaacacacaaggaaaccttgatcttaacattacagtttacacaaaatttaactcaaaatggatcatagacttaaaagtaattcataaaattataaaatttttagagaaataggataaatatttaagatttagaagtatgcaaagagtgaaaaggaaaattgattcaatattgctttaaaaattgatgtaaataaaccttttgatctgtgtaataccctgtgaaggggataaaaagataagttatggattgaaagaaaacatttcccaaccacatatccgacaaaggtatagtatataaagaacactcaaaactaaaaaaaaaacaaacaaaaattaattaaaacataagcaaaagacattaagaaatatttcaccaaacaaaatatataactgagaaataagcacataaaaagatactcaacatcattatccattaggaaaatgcaaattaaaaccaaaatgagatattgctatacacctattgaaataactaaagagtagtgacaacaccaaatgctggtgaggatgcggagaaactagggccctcacacatttctggtaagaaagtaaaatggtatagtcactctggaagaatatcgcagtttcttaaaatactaaacgtgcaaatacatctaggattaaaatactaaacaagcatttattaaaatactaaacataccatacaatccaggaattaaacttctgtctgtgcatttattctagaaaaatacttctattcacacaaaacctgtgcacaaatgtttatagcaactttataacagagctggaaataactcagatgtccttcaaaggtgaatggttaaacaatctgtagtttgagtcccagatacttcctagttatgtgaaagcacagttattttattccttttcctacattttctctctcgtagaataagaataattgcgtcaatctattaaagtttttgagggaattaaatgagtcaaagtatgtagagcacttaacatggtgctggcacaaagtactcagtaaaaattagcaccaatagggagtgtaaattagttcaaccattgtagaagacagtgcggagattcttcaaggatctagaaccataaatacaatttgacccagcaatcccattactgggtatataccctataagtcattctactataaagacacatgcacaggtatgtttattacagcactgttcacaatagcaaagacttggaaccaacctaaatgcccatcaatgatagactggataaagaaaatgtagcacatacacaccatggaatactatgcagccataaaaaaggatgagttcatgtcctttgcagggacatggatgaagctggaagccatcatttttagcaaactaacacaggaacagaaaaccaaacaccacatgttctcataagtgggagttgaacaatgagaacacatggacacagggaagaaacatcacacactggggcctgtcaggggttggggggctaggggaagggatagcattaggagaaatgccaaatgtaggtgacgggttgatgggtgcagcaaaccaccatggcacgtgtatacctatgtaacctgcatgttctgcatgtgtatcccagaactttaaagtataataaaaaataaaaattaccactaataacacttgcacagcttgtagaagatagtcttaagattatgaaatccatcctggttgtgtggtactggtgtcggggatgggagcaaaagcctctgtctaccattgcttctttaattgactagtttgggcagcaagaatataaaagctagacatgacacactgtgtaaaaatcaggaatgaaaagcatgatgtggtcaataagaaatgcaaatacatacaaaaatgctaaattgctttagtgtagaaagattgcctgctggaaataggaactataagtaaaactctgtgagtgtgatttttaaaatatgatttattacaaaattccagcagccaaacaaaagaaagatagtccctctaataaaaactgaacatagcatttcttatctattatttgtttattagggttctaattagccagacagtgtcacttaatttcaacacattttataaataatttgccatatgtctgttagtatttacgatttccaggcagtttggaaaatgaacatatttgaggactctctattcattggttagcatgaaaacccaagggatgctacagacacatttgttcctaaattgcatgtgcctctctctttaccaggaaagtgataatgggaaagagctggtcttaggagaaagaccagtgatggaaaatatactagtcttaggagaaagacaatgtggtttgaggtcccatgttcaccaccaaattcctgtttggctttgagcaattgtattcacttctctgagcttcagcattctcctccatggcacaagggggcttcactaaataacctccagttacccactagtgcaatattctgcaatttaaccgtatctgtgattctagaccacactcgtccctagaagccagagcactctgagtgaagggaagtaaaggaacagggacttaagcattcttctctttagcagatggagaattttgaaatgccaactcgctcttttaaaaattctagactgtctaaagcataggcaaatttcatgttcttaaaaattcctagcttgtgtcttacacacacagcgatgcagattttagatggtgtgggtgtttcttctcttgtaaaatgtttcctatgtccatgtttcttcttggtattctgataagatctgtaggtacatacaaagttcacaattactctaccaaccaaccaaaatcttatgtaaagattttcatgaagttagtatgttcacttctttccaacaccttttattcctaagtttggtaatatttcttttttttactacccttaaaatcaacttactgctcattctaccttctcttttatttatggacccatcaataattatccatcaatacagcaacttgctcatgacatttatgccaattagttgagttgtaggtaacttaataaaaggattatacatgaaaatctcattttagggtatgaatcgaagctatcaataagcccattactaattctgattttctgtaagtttgcaccattcacataatctgccactataatatattggtcccactttccttattttgtataatcaaacagtaatcaataaaaactatgactactgcaaaatgagacttctgaagctttgagggcaaattcatcatcagcatgcatataaaagtcactgtagagagtcttttctttcttaagtgcccttgaaacccagcagctgaatcatatttcaggccccccaaagagaactgcaaggttataattgtctcacacttaattacatgcattaccaaaggtagatggacaaagtcattttgtaccatgcgtagagaataaaaatcaccatgaattttgatattgctggctcattgattcacaggaagtagaaatttatgcaagaaccatgtctaacaatgtaaatgttcagccaagccaaagaacactgccttcactgttctgggactcggcctcacattcacagacttgctattcttctctttcactcttgggcctagcgaggcagcttatttttcctttttctttcattggtcacagttatttcttttcagtgtgtcatcttctctaagtttctgagggagtgttagcttgaggccttgccttgacataatcagatataatcagaaaaatgaaaaattccataggaaagagaactattttagccaaggtgtgcgagagaaataccgccactttcaagcactgttttcttctactggagtctgctcaatarggacgtcagctttgctggggtaagtaaaagcatcctggccttaaccyatataatgggggagtaattgcctcttagaatcatcaagtctaagttctgaattaggcccaggatatgactacttttctttacactgcatttgaaatttcatttggctttctgggtgcgagatccacatttcttttctaacagaatgttttatttttcgtcaattgatttcattatgataagctgatggcaaatgctacttcctcactcaacagggcttgcagtctgaatgtgcctgaatacattttatgataaataatatatcctgctatcctgcattcatccagtgcagcctgaggaagcagatggagttacagccttcttctcaaagcagaaagaaactatagctttgaggaagagaatgagatcattacatggcttcccaatttcatcttgataaactctgaagctgccatattgcagtagttttcaactataggtgggaagcttgactytcctttgagttcaaaggagaaaactgttgcttaaagaaaaatgtgttttttccctaagtatgagttactccttccagaaaaaaaataaaaaagccccatgcatgcaggtctgtgatgaatacatttaggacagtcctgtggcctgctattaaggctggagtgacactatcyctaaccctaaggtgaaaagtaatgttaaaaataaaaattatactgagctgctagttattttgcctacaggagtgcatgcctgtgtctggtggaacttggtttttctctgaatttgccaggcaattttctctgaatttgccaggtaggcagaggagaatttgaaaactgtagagaggagcttgacctcccaaagccaatctggcactctgctacttccttcttccacagtttcttctctgtttccagatcttgcaaatgtacagtcaagactgcttggagtattattccattaacagacatacagttacattaagccattaatcaggcagatcacagatgttgttttctgtctagatgttactataattactcttaataacacccactgagtttgtcatttcatccattgatgactttttwaaaaattcttggaaaattcatttcttacagcctaattatatggatttaagggttcaggatctctcctcaggttttcatcatgtattttttaaagagtatagcagkataacatcacatatgggtggattaataggctcttgagaaactgaaggttgaaacccacatgctgactttttacagttaaatcatactcctctcgtgctaaacgatgagccttatcttttgaagcatgtgatactgataagtccagtgaaggaggctgcctttcaaaggaacggagctctgaggaatggaatggaacttagtctagctgcctagtttacagatgataaaactaggacctagagaaatgaagtctgaattactgagagaaaaggacaccagagtccaaggctcagagctctcaatccagtgttgcttcttcttgtttattttgttttgttttgagatggagtcttgctctgtcacccaggctggcgtgcagtggcgcaatctcagctcaatgcaacctctgcctcctggattcaagcaattctcccatctcagcctcccaagtagctaggattacaggcatgcaccaccatgcctggctaatttttgttttgttttttgttttttgttttttagtagagacggagtttcaccatgttggccaggctggtctcgaactcctgacctcaggtgatccgcccacagcctcccaaagtgctgggattacaagcgtaagcaccgcacctggcccagtgttgcttctactaccactttcattcttcaaacagcttctgccatgtcagaagggaatgaaaatttcttttgtgactcaaaagtaaactaaaactcgttggattcctgagactgattctacccatttacccactctccttaaagtaaaacttagccaggcattcttaaattttgctttgaacctagggagttctagcttttctgctgattaaatgtcactgatttctcattttctggtgacattgttttacaattcttttaactacaaagtttaagtttctggagmcttttcttcttttcattttttataaaatacccttttattaagagatgaagttgggtagtcagaataggagtgggtattgtttagtagraaaaaaacgggctttggaataaaacttgcatatgaattacagttctgcttcctataattgtgtaaccttggcaagttactkcgcctgtcaaatgctcacattaaaagagtgtgtgtgtktgtgtgtgtgtgtgtgtgtgtgtaattgccagtacaattcaataattggcccacagaaggcacttaataattgctagttactactaagagaaccagatgagaaagaatattaatggatatggcattttttgtttattaagtactgtcttaaacgtctggagaaaagaaggagaatctcattttctgctttcgttattagtgatcactggctgctgttgccaatgcagggagccttgcagatagttagcagcctgaaaacaacttgtattatttgagaggaggtacttttgtctcttagataaagtttttgcaggtcgctctggtatggtgcagtatcaatctgaactcattaagttgaagaagtgacacaggaacacaagaatacattgtttctttgcctcatctgcttaattaaaaattccagatccctccactcacaagcaagattgatggtgaaatcttcacacacatgctaccgtatgttctctacctcctcctccccaagtacaacctagagcagtggttcccaaatatgcttcctgggccggctgtatcagaattactcgggaactattagaagggcaaaacctcaggccctgccrcagacatgctgagtcagaaactcgggatcactcagaaatctgttttaaataggccttcaggtgattctgatggagttccagaaccatgacctggagaacatgcccagttactatatgtactgcagtgtttctcaaagtgaagaacaggtaccatgatagaaccaaaaatgatcttaggtaggacaaagatgactttaggtgatactcacgtattatatcaaatagctagatcacatagtaaaagttttccctctcaactctctttccatcattaagtctcattttggtatgactagacctttaatacctctctacccattgctaatctcccatttcaacaaagagagctggatgcaattttgatgtctttaggtagcagcagggtccagctaaaactcagcaatagttttcttctctttatggcatgctatttaaatggtgataaacttttcctttataaatgtttacattaattaatcaaaaaagttaaaatacagttggcacgtggattagcaaaattatgtcagtgatatggcagtgaatgtatttagagaaatgctggtatgctagaaagaacctagttacatcagtgctttaatttcatttgtgccatttattagctgtgctattttcttagctgtgctacttttgtaagcctcaattttctcatctatcaaatgggagtgataccaacatcatagaaatggtataagaacttatgaatggaatatgcctcctgtaaccctcagaacatagtaggaacttgctacatccttattctctcaaatctcactttgaagtcaggtttctgtgtggccttctcaatagcatttctgttggggcttcagattcttcatttgtaatgtgacagtaaagacttgaagatctgaaaggttccttccagctcttaactaatatgtatttacacatgtgtattgtatgtgtgtatgtttacatatagtgtaaattctgcatataagtatgacttaggcataaatagttattttccccaggcataaacctggagtgtgcagggataatattgaaaatagatggctgtgttggaaaaataaaaaatcaaattgtgagagatgtgggcgctgatatacatatcagagctcaaaggtaatttcattgtattttaccatcatctgtcaaacttaaagcaataccgacactagaaaatagatttttgcagaggtttctgaggacaatggtttccatgagctggtgtaaatatattcagagagacttgttcctacttaataacccgcgtttttccttctgaattgctgatgcattcatttatagcatttgaaaggcagtttgtcctttgctgtcaagtgaacttgacacaataataagaaattctgaaaaattcaatcaaatcttgttgcttctcaaaggaatttctcgactacttattctgtttaaggagaaaaagagaagacagtgtttctttggtcttgtataaaacactaaccaagtttaacagcacaggttcttgttagcaggtgccacatggagttttccctctcagtaatccaggggacagttctaactgaggtttgggggttctttgggaagtagcagcaatacataaggggtcaccgcaaggctgtactgttataaaatcagaagctgttatcagcttatttattgcttacaatatgcttgtgaatctggagacctaaaaacagagaaatggcgaaacttgcttctcttccttagacgataaaatagcttgcattgtcttttacataactgactattatagaatcccagaagctagatacactcaaatattggcaattctgatgaaatgccccaggaactattagacttgatttaacaggcactgaactgaaaattagcatgtaagacagagagaatgtgcttgcaatcatgcagacaacagttcaaattactctctttgagctccagtctccttatctataaactgaggataaaatgtttctacctcacaagattgtcctgagaattaatcgaagaggtaatattggaagtagccagaacatctaacattaactgagtacttactatctgccagttgctatttcaagggcttcaaccgcataggatcatttaagcctcaataaatctctgagatagttactattattagctccatgttgtggatgtaggaacttataccagagaaaatgtaattaacttgccagccacaatgtggcaggaagagacagagccaacatgggaacccaaaaagtctggctgcagatgctccttctttaaggcttaaaaacacttgacattgttatcagcatttcatatgagttgaaccatgtgaaattataaatacttgaccatttttgacataaaaatagcaattttttgtggtggtacctactaagcgctggatatgtattagtagtagctacagttgctactactgctaatagcagcaatcataatattgattttatcccaaaccctcactcattaaggaatacaggtggcattatagagtaaaaactactagcttggcgatcagaagctgggtgaactctaggtcttaattctcccatttgtaaaataatgggattggtcttttccagttttaattgtcaatggcagaaccttaaaaactacctatgaggaagaaccagatatttctgtccaatctatcttggaccaatatctagttctgttatgaatgactagtatatagttcctgtcatatacaactcaccatgtgagtttgacaatacccaaattggtacctagcctgctcaacacggcaagtttagtgagcacatgcttggatattgtactagaatcaaatttaggcactcatttctaaatacctattttcaatgcctgtacttaacttgctacaacccaatagtaaacagtttgtggactgacactagtttatgcactaccctttcaatagcattggaactctgtgatatatatataaataaattcttaaagggaatatgtgcatgtctgtgttcccttcttttagaaatgtattctctttggagattagaaatgagtgtccacaaagcaaaagaatatttttaaaagaaagaccacagatggatcataaaaacaatagtacttggggcattcatataagatagggaaaagacatcagcgtgtaccaaattttgttagtacatgtatttttttaatgttttttatttaaacaataattaacagtctttggtgtcatcatatttgaagcactagagaattagagataaatgagacatggtgaccgtcctcatagctcacagtctagccagagaccccagaatgttagcacataattgtagaatagtgactaatgttctgaaggaagatgtatttaatttggcttgggtatcacagggggctctacgctttcaggtgtgatttcttacattttgttgtttagaatggttttactttatttttttaaaaaaactttttgttcatttatgacacatacaatatgaactaatctgaaatgcacagcttgatgaactataacaaagtgaacactttgtatgtagctaccacttgatcaagaaataaaatgctaccagctttcgagaaggtcctggtgtgcctcttcccagtcaccaccctctcccttttcacaaatgtaaccacattcctaatttccaacaccaagaactaagtttgcctgttcttaaaacctgtgaatggaaccacactgatatgttccttggtgtctggctcttttgcttaatgtcatgtccacagtcatggttcccaaactgcgggctaaagcatcccagggtaccacaatgtgctcataaggaaacagcaggatattttttaaattttagagtcacatagtgataattgacaactttcagacactgaatgaaataatagcccatagtagttcagtttcaacattagattgtgctacatttcttttgatgctatatcttttaacaccagattttcaagagtatctgtgattaaaagcaagtacacacaaaagtcaacatgaaacaaataagggtggccaaatccgatctgattccaatattcaagaagctttggtatgcccaacaggcacacaaatcctattagtaatttcttgtggttatttaaggatgaaaaatatcagtttttttctttcaatttatgtgtatttttaacatgaccgctaagttattataacataagtattggtcagggacagtgtctcatgcctgtaatcccagcactttgggaggccaaggtgggcagatcacttgaggccaggagttcaagaccagcctggccaagtagcaaaatcccatctctactaaaaatacaaaaattatcaggacatgttggtgcatgcctgtaatcccaactactcaggatgctgaggcaggagaatcacttgaacccgggaggtggacattacagtgagcccatatggagccactacactccagcctaggcgacagaccaacactgtttctcaaaaaaaaaaaaacaaagtatttattaagttattgggaccttactacttcataatcagaactattatgtatttcttttggtgtggtggcacctgtgaaaaaattcctacgacactaagggagctaagaaagtttgagaaatctcattatgagattcatttttgttgcttcatggaatagtcatttgttaattttcatttgtgtgtggttttctatcatgtgagtacaccacaacttacgtacattttctactcttgatggaaatttggattgtttccaggttggggcaattatgaagaatgttcctatgaacagtttttggcatatcttttagcacatatatgtgtgtgtgtgtatatatatatatttctgttgggtatgtattyaggagtgaagttgctgagctttaactgatactgctaaacagttttctaaattaattattccaatttacattcccaccayggttgttggagagtatcagttgttttactcaaaataacccttaatatttgaagttattttaatactagtaaatgtaggcatatacagatttttgtactttgtaaagcttaattcaattttggggattctacttaagaaaataatactaaacaaatttaagtttaaaatgagtaattattaaaaatgagaaaataaattacagaaaagtataaaattttaaagctaaaaaataaccccaaatattacaaaatgaaaaaaacttgagaaaaataatatgaattcactgcccatcacacccctgcattgttttgttcctatgtccttttgctggacattcttgaattgccccttcaaaacaattttgtattctcattttttatggagagatagattggtctttgttacagtatgtttgatcaaaactttttaaatatagtttagaaaagtttctttaggttcacaatttgtcaaatttggggaaatctctatcagattttttttaatgaactgcagattttcagttccttttaagttgcayggtaagcttaagtgctctytgaattggaacactcattaacagctttttttttttgtcaatgctctgttggtagtaacttacgtgtttgcttagatactcctctttgttgacatctaaatcaacgaggcaggcaatagggtatacctagaagccatttctacctttggaaagctggcaattagttactcagtaagtactcagtaggtaaggcaattaagtactcaaggctgaccacaaaccactaaaaatatttcactaaactgaaactaaacatatccccaactcactttaacccttaccagttcccacatatacacatagctacttctattgaagtgattatatgacttatctcctcttttttctaaacctctttatgttgaaatatattagttgcttttctaacatgaagccagccttgcattcctggaatgtatgccacctggtcattatgtattagcctttctatcaatctctggatttgtctggaaatatttggtttaggattgttgcttttatgtttataaaagattgacctataatatacttttggatttttctttcattttatttaaggtgttcatctgcttttggtatcaatgctctgctgtcctcataaaataaattgggaagtgttttctatttttatgttttctgaaacaacttgtataagattgatggtactccttagctcttggaagaaattaccagccaagccacatgggccctgatttttgtgtgtgtgtgtgtgtgggaatgttttaaataatgaattcaattgctttaataaatataggatgattcagattttctgtttcttcttataaaaaagaggctttatttttctagggctatatcctagaagaattattattaaataaatttttaaatttattgatacaaatgtgctcatatcttccaatggtattatttttaaaatatcagttgaatttttaatattccttaagttcccttcattcctttggttattggttatttgtttcttctcttttttctgttttatcagttagctttttcatagtaccaaattttggatttttaaaattctttctgctatattttttatattgaccttcttccgtttacatttgttgggttccattcgctctttatttttttatcttcttgtaaaatatacttaaacaattggtttttagcctttcttcttttctaatataggcatttaaggctatcgtttccccaatcatagctttaggtgcatcccatacattttgatatgccgtatattcattttcatgtaatttaagatattttagaaacttccattttgatttattctttggtccatgggttatttagaagttattgcttggttttcaaacttaggggaaaatgttttttagttatcctttggttacttatttctagcttatatctattatggtctgaaaacatgtctatcatttcaagtctttgaaatttttttgagacttgctttatggctagcctgtggcctattttaataaatgtttcatgagcccttgaaatccttgtaggcygggcgcgatggctcatgcctgtaatcccagcattttgggaggccgaggcgggtggatcacctgaggtcaggagttcaagacctccttggccaacatggtgaaaccccatctctactaaaaatacaaaaattagctgggcatggtggcacgcacctgtaatcccagctacttgggaggctgaggcagtagaatcgcttgtgcccaggaggcagatgmtgcagtgaactgagagcttgccactgcactccagcctaggtgacagagcaagacttctttaaaaaaataataataaattaaataaaaagaaatcctatgtaaaactaggagtatacagtcaaataccctgtattaattgggttagttacttcttcctctcccctttagtgaggttatgttatttatttgaaatatagctgagtttatttttcagttttatttttctccttcccatctttgtcaatttaattttttattgaatatagagaacattaaactacatctaaatatcaaaattatacaaaaacatatgctcagaaaagtgacactgcctcctgtatttcttctgcttcattcccctacctcatatgggagccaatgttgttcttgtcattgacttcctgggtttctctttgtaaagataagtagatgtacacatattctcttacttctccttctttcttttatacaaggtaacatgtaagcttctttgcaatttgctttttttttcacctaacaatgtatcccagaggtcattctacatcagttcgtagagatcttcctcattctttgtttacaactgcattgtattccattgaatgtatggggttatagtttaatcagtgtcctatgctcagacattttggtagtttcctacagatattactttaatgagtagcctcataaatatatatgtatcttcaggataaattcctagaaatgggctgctgagatgaaagacagatgcatgtatagttttattaactgatgccaaatctccctcagtaaggattttgcattccaaccaatctgcatgcctaccagtaattcatgttttccacagccctatgaacgaaatatatcatcaagctttgaattttttgcccatctaagtgagaaatagtatctcagtgaattttaacttgcatttatcttaacatgaattaacttaaatagcttttcatatgttcaaggcccatgcttatattattttataaattgcctctctttttcttttgttcattttgctatagaatgataatttttccttcttttccagtttgtcatttgtcttttgactttgcttctggtatttttgccatatgtagtcagtttatcaatcttttatcacatctggacgttttagtatcagctaaaaactttttcataaacctagaatataggggaactcaccaatattttcttgcagtaaagttacattattttacatttagaattctgatccatttattttcctatatatgatatgaagaaggaatctgtttttctatttgtgaaaaaatggttatccagttgcccaacatcatttatttaaaagactatcttttccttagtgatttgagatacaacctttttaatatactagatttctatagatttctattccgttagtctgtttgtatcctcatgagccactaccacactattttaattatagtctttacagtgttaataggactatacccccttcatagctcttcctagtgactgtttttctacctattcttatgcatttatttttccatgtgaactttagtcccaatatatctaacttgacaagaaagcttgtcaatattttcttgggtgaatctataaattaacataattaacagatattaaaataatgaaaaatgagattttcattatgttgagacatcctaaacaagaacaagggccatctttccactttcaaatgtacttttgcatctttcagaggtatttatagtttcttcatatacatttgaacatatcttattgtgcttgctcctaaatatttttgttggtattgtaaataaaattttcttattatatattttacctattatctgtgtacatgaatgctattgagttttgttatagcttcattctataatgtggtttttagcattataaaatatcttttgcctcctgttatgctgttttctactttgtccaatatgaggatttcagttcctacttccttattgttttcatttgcctagtaaacaggcaaatgcttttgcccattcctttatctttagcctttttaaaaactgctatattttagatatgtctcttatatacaacatagagttgaaatttgatgggtcaatttgagaatctttttattttaataggtgagttaaactcatttgtgtttattgatataactgccaagcctctcatcttatgttgtaattactataagcactatatttactgtgttttttctatctgatgttcctttgcttttccttttccctttggctattatgaagtttttgtgcttttgttttggtgtttagttttatacctttgtggtacccttgactttttttggtctcacttaagcttttaaagctttcaatggctaccccttctcataacaaaatccaatatctttgccatggcccataagacttttcataacatagtttttgactacatatctgaagggtttttttctgccactctgcacttaatcactgaattccagcaactgaactttcttcgtcatcctaaatatattctcatctgaagtccttcacacttgagttttctccttcagaatatccttctcccttccccaaaatttttacacaattcaatatcccatttcattcaggttgtattagtcagttttttgctttactataaaggaatacctgagactaggtaatctataaagaaaagagggttaattgatgtatggttctgcaggctgtacaagcatggcaccaacatctactcagcttctggtggggccttaggaagcttacagttatggtggaaggcaaagcaggagcttgcacctcacatggcaagagtgggagcaagagagggagaagggggaggtcccagactcttttaagtaaccagatatcatgttaactgagaactcaattatcaccaagaggttggtgctaaaccactcatgagggatccacccccatgatccaatcaccttccaccaggtcccacctccaacactgggaatcacatttcagtatgtgaattggagggacaaatgtccaaatgacatcacaggtcttggccttcatttcatttcatcatcaaaaatgtccctaaccctcttatttaaaagattactccacatcgttctctggtgtctagcataatggttgacttttttttctcaaagtatgtacattactaaccattattcattaaaatcacaggtagattctgaaggccaaagaaaaatatttgaatgggtcctttcaactaaagaatatattttccatggtttttaacataattaaaataatggtccagctaaaattctaaaacttaaaggtgtggcttaagtattttgaggctctcaaatagagaacagaagtggaatgggatttggcactcaagatgcaagtggttggccctgcctgataaccagatgacaggcctgtctgtgaaagtttttctctagattctttccacatcacaatttgaaagttacatctacatgtttttctgatggtgtaggtgggctgttttcttatgctccctgacctactttaacaggaatctaggataaatgtacattctgaacccatgagtaaaatgtgtatgatgtgaggaacctacagaatggaagtctagcaccagctgtcccatgtagttttccaacttcatgctacataaagcagagaagagaggcgtcatgaattgatgaagtatagttcagcaacctggggctttcagatttttgccagatgaaaagacaactggagctggcttttaagtaccggcataatcttttaattctggcaaaagtttatgagtaagagattgcctaatcctaaatgatgccaacaatctgtaactacattacagaatcctgatgtcaaagaatttgcttccaataaatttgctcaaacttctatgagacataaaatacctttatgaacagtaattgttattgtgtcttggtgagctaataacaagtacaggcgtatctccagggcaagaatggggtggaggatggatcatggggaaataactttaaaatggtctccagggctaaagcagatggtagtatatttgaaaaacgcaggataataaattatagctatttacatttctgctctgaaggcaattcctgtgttttctgtaggatgacttctttgcaaaggattattaacttcagagaggagaactacaacaaatgatattttaatgactagtatagtattaaaaatgtgttccttttgttgtgattttactgaaaaaaatcatattttggtagagagatcttgattatattttagaagctctgctgagtctttctcatgaagtaaaatggtaacacattttaggaagaaaaatactaacatgggtttccctttcagaaattactcatttcaacaaatatttaacaaggtcctgttatggtcatggcatggcactatgccaggtactaagaggaattaaatatatcccttgacctcaagccatttatgattttgtggagaatatttcaaaagctaaattttctgtatgatataaggtatagtaacaatatgtagctgacccaccccactcacatttatagtagctgattttgtaatatctgcttttaagacctttctagttgggaaaaaaagcaccataaactctttctgataataaccaaacaatttgtagtgttggataaatgtaatcagcaatgatgagaaaacatgatggactgactgatgaggtggaagactttgattgcctgaatatgtggtaagatcgtgtatgtatatgcctagaagccaaagtatgattttcgcaaagggttgtcrtaatacaaaacccttaagaaaagggaaagtgagatatcagaaaaaaaatacatttttggcttgagcaagggaatatttgatcgctctaggaggagaatctattgacataacctcacagttcagggaaaagctacaaggaattgtgacactgtggaatataaggaaaaaatggatagagactgggtatgaagggaggctccttgaaggaagtggtttttcatctcagctttgaaggttatgcatgggtgtaatatgtggaaaagaatgattgagtcagaggaaccagagggaccaaatgtatgaaaccctgaacttgctgggaaacttgtggagaaaaataatttcactgccttgttggtaaaagctaaggaagcaaagatagtttgcaagtagttcaccgagggtattattcagtaagcaatgaagagaatgtagggtgtgaagaataatgcaatgagactagagttttagaaagataactttggaagggcaatgtaaatgacaaggagaatatgtgtgacagtcattcacagcagagagaactttatctcatttagtcctctgcaataactagcatattgataagcagacattacacaaataattcagtcagcactaggttacagcatgtctaccacattcaagcatctgtggaggtgaaaaaaaatgaaaaaacttaaaattttttcaatgagtaatgaatttacagagttttgtggtcatccaaggtttagttgcccaactgtcattttctgtgtgtaaattgaaggggtacaagtgcaattttgttatatggatatatttcatagtgatgaagtcccagcttttagtgtatccaaataatatacattgtactcattaaataatctctcatcatttacctccctccctcccctcctcattcttttgaatctaatgtctatcattccccactctatgtccatgcgaacactttatttagcttccacctgtgagtgagaacatgtggtatttgagtttctgtttctgagttgtttcacttccttttgaaatggttttcattccactcccaaggatatcagcagttgggaccaagttcgaagaatgggccctataaaagattayaaattttattaaataaacaaactaggaagccagaacaatttaatcaaattggatgtgactaccaatcagagggcagaaaaccccatgaaggacstgctgtttttgtatatttctaacacatgaagaaaaatctttacctagaagccaaacattctaagccatgcctaacttgcctcctagacattatacaaacatgtacagtataagcaacagctgcttgacagagattttgaaatcaggaaaaggaaaagtctctttggttgaaaatgatgtggtaatatttatcctcacaatgctgtgtgtgccccaagcttgcctttatccttaacccctgaggtgagagagaagctgaattcaagccagtgggtcaagatccaaaagtagcacatgagcttattcccaatgcaggtgggaggtcccagagaacaacatgctctataaaactttgggcagcagatagagatgaccatatgctcctctttccatttctacttgtcattttctactcccctctcccctgtagatgactggaaagcaaaagctaaacattcttccgacaacaacaaaacaccacaagctatacatctcagcttgttcttcaacaagcacagtccatttctgagccagtgtttggaatttgaactgacaactcaacccaacaattttgctgctttgtctctctatctcgagttatttttttgtcacatcttagtccagggtgtgagaaacagagctcttacagattttttttttaatcttgctgaggaattatctctgtttcagctccacaacattccttttgaacattctcccactgagcatgtgttcagaggaacttcagcctcatcagtaatctatatctcagctgtcactacttttccagaaaaacctgaattctcagtttcaatggaacacacaaaataagttctcataagactaaggtggtatagatggcaaatgttgcaggcataaacatctggtcaaggggtgctatagatgcatacagactaagttcattctggacagcaccttaaggagaattgaagataccaaggtcttacagatcctcagtcctcaaggaaaaagcctgtcatgttaattagtccatactttggctagaaatctgtggggaagaaacgtataccacaaggagtgtaaccaaaaatttctcagcctgatgagaatttgtatgtgagtgtctgaaagcacattgtgaaccaaaagaagtattgtcacttgagcccgtaattaaggttttatttccttaaattttaagcatggttctccctattggcccatctgtacgtttcagttttatccatatttatctccatcaatagcatttcataaagaatgttgccctgaaaaaggcacatccttttgtacagatccattaatgatatatgtaaaatcaacctctatttatatctgcctcatgcagcccaagactgaacttcatcaccctagacagcatgctcattaccctaggagcataagaatcagatgttatgccctattagaagcactgttggtttgatcaccattttattttattttattattttattttggggacagggtcttgctatgtctcccaggctggagtgcagtggcatgatctyggcttattgcaacctccacctcccaggttcaagcgattctcatgcctcagcctcccaagtagctaggattacaggcttataccaccacacctggctaattttttgtatttttagtagagatgggattttgtctgttggccaagctgttctcaaactcctggcctcaagtgatccacccacctcagcctcccaaagaactggaattataggcatgagccaccatgcacagccttttggttatgattttaacaaccaggagtctattagatgattcatgttgtatgactgcccacaagtatggtagaaaaattgccaggaaaccacagggcatatattatattcataacaaagttttcccataaagttgaggtttccctctaaagtatttaatttataatttaactattttgcatgaaaacatttggaaatatgcttttaaagtcatttttaagatttaaaacgcgtcttctcactgccaaatgtaattgatttaaaaacatcacacaaagtaaaaatagggttctgtcttataaggtttcatttctcagctaaatttctccatctgtttataaattgtccagttcctccactagatcctttcacatattgtaatcatagttattttataatatttgtcttctaattctaacgtctgtacttctacaattgactattttttcacttgattatgaaccaacttttcctgctcctttgcctgtctcataatttttggttgtatgctggacattgtgtgggaaaatcaaacaggatgaaataaatattaactccttgaaaagagcatatccctttctattcagacagctgaggtggagagttgagtcaatctaatcatctaatctataactgagctgaatctgagatttgctgcagctttatttaaattcacttcaccactaccatcaaacaatttgaaggcagcattagggctttaccttcattgggtcttagaacctaattattagtgatagtttcaagattcccctgtattctacaacccagctttcagctgtccaagttgtatgagatttctcttgctctctcctcttatagcacaaccataaacttttgaggtagtatattttctctctgctctctagttctgtaaacagttttctatgccttgttaaatctctccatcatactagcctgccaccagccttcagtagactgatgctttatatttagtaaagttcccaggctcctcagagaaaatctctctctgattccctgccctactccagagtttggcacattaacactacgcacttggcacacatgccatgaaaagggttggagagtgacgagtgactgcagacttactttgggctagatttgcccaggattctaatgtgtcatgccagcccatgcctgaccataaaagattgataaaaattgggcttgtttctccttacccccacctatggcaggttttgttcttcttgtgccgtgccctccgggatgatacagctgtggcagtgttctctaggagtagcttctctctctctgtttatcatatttaggtatttttgtgtcgtcaggaagatgagggtttttttagagtataatcgtgtggcttatttagctttatctctttgacaagtgggagcaaatgtatcttaagagcagtctacattctagaagcacaggttatacagtaaaaattgaaagcctgtctccttgttctccagatacatccaagtgtgtacacattcacacacccttattcattcatttgtttcagtgtgggcatatgtgtgtaaattttaaaataaataccttgctatatactctctctacaacttaacactttttatcaacaatgtgttgagggcatttttccctattagtacatataaaactaccttattcttttgagtatttatatagtattttgttatattggttgagccatcacttatccaggcaatttcttactgatggacatttagttattaaatacataatactacaaatactgtagtcatgaacaatcttacaaaggtagccagagttttatragtatttctaaggctgatttcctgaaggtaaaattgccagtttgaaggtgttggcttattttaaaaggtgataataaacacaatgtgatctcatactgctctgtggcattattatgattattattgctatactgcttggatgttctgattacttgttgacaaatgctgggctatttgaccccttgaacaaaggcctaagaccagagaagcaaactggcttttgtggaacacagctcccattattgttctataaaaggattctgtgttcaagttagattggaaattccagtatactttactcacctactttcgtttttagagatagagactctgggaagccataaagaaaagtgagaaatttaactttattcaaaccagtgttttccacwcatcttgatcaaggaactctttattgcctattacctcttgacatcctatagaactgtaaacaattttgttctttttaaaataaatttatatgtttgtttcttcaatctcttccctggtaaggaggtattcagcacttttcacaatgaattgtcttttcttcttatctgctattccagaagggctttttgcttagagatggggtagattcatgcttgttagaattgtttacaaactagaaataagcagactttaaaaggaagcctgaggtgttacctcataattagtaattacagcttttagtgcctgaacactattgaacctacttgaccttcccaaaattcttctcttgtttcaagattttcatctgtattttcccacaaatgaagtattatgtacttggcaatctcctgaaatcctaacttaggaaagtctcctgcttatttaaagcttaagtaggggtaatgtgttctgccagaagaggaaactaggaaagttcagtaatcttattcatcataaggtatcagaagtgatctgtgcagttaaacaaggaaaattctatgctaggtagagtcaccgttaattaagaacttactatatgccagccactgtgctaagaagtttacctgagtcacctcatttactaggctcaacaacaaactaagaaatactattattttctccattgaatgaataaagaactttgggctgagtgaatctaaaagaaaaaaaaaagcgtgttgaaagtgacagagcaaatataaaaataagtgacaaagatgagagttaatataagcttgcccaatttcaaagtctgtctttaaccactacactattctgtccactctgtgtgtgagtgtgtgtgtgtgtgtgtgtgtgtttgtgtatgtatgagagagagagagagagattgagaagaggcatacagaaacagggatagagagaatgagaataaaattaaccaaaggtattgtttggagatgtcagattaactaaaataagagtccgaggttgaaggccagcacaagctcaggtaaaattttcacttgtcagtgatccttctagattccattatatttgctgtcttcatttctactctagagcttccagtgacgtagttgtcaaatatgcaataaaaatctactctacagataatggaactatcaaaatctcaacttaaaaaaaaaatccagagtttcatacataaaaatttggctcaatttctaatgaacatagattacatgaaatcaacagtgttttctctatggatagcctataaatacaagtaaaaagtaaggctcaaatcaatctacagctgggagcacacttgaaaaagcaaagcattggtttttaaggctcaaaaaaatcttaaacctatttgatctggtgtcactattacaatttgccatatacagaaaacatgtatttattcagcacacatgtattgaacatttcacttccaaggcataaagtcaactgtcacaatgcctatacaaacacacagcaattaaaaaagttaagaagtgaattgctcgagtgcatttgggaatatttttaaaaatagaacattaaagaaaatatgcaatttgattcaacatatataaatcaataaatatgattcaccacataaacagaattaaaagcaaaaaccacataacctcgatagatgcagaaaagcttttgataaaatccaacatcccttcatgataaaagccctcaacagagtaggcatagaaggaacatacctcaagagccatctataaaatccacagccaacatcatactgaacaggcaaaacctggaaacattcccctttagaattggaacaagacaaggatgcccactcccaccactcctatcaacagagtactggaagtcctagtcagagcaatcagcaagagaaagaaataaaaggcatccggataggaaaggaagaagtcaaattatctctatttgctgacaatatcattctatacttagaaaaccctaaggactcccccagaaggcaactagaactgataaatgagtttaacaaggttgcaggatatgaaatcaatatacaaaaatcagtagcgtttctatacattaataacatctaggctaagagtcgaagaatatgattgcatttaaaataccacaaaaaaagtgaaatacccagaaatccagctaacgaatgagatgaaagattgctaaaaggaaaactacaaagactactggaagaaatcagagatgacataaatgaaaaatgttacgtactcatggattggaagaactgatatcattaatatggccatacttccctattggaatttagagattcaatgctattcctatcaacctaccaatgtcactcttcacagaattaggaaaaaacgattctaaactattctaaaacgcatatgaaaccaaaaaaagagtgcaaatagcaatcctgagcaaaaagaataaagccagaggaatcaaactacccaatttcaagccatactataagcgtgcagtaaccaaaacagcatggtactggcacaaacacagacatgtagctccatcaaacagaacagaaaaaccagaaataaaaccataaacctacaaccatctaatttttgataaggctgacaaaaacaacgaattgcttttttttttattattatactttaagttttagggtacatgtgcacaatgtgcaggttagttacatatgtatacatgtgccatgctggtgtgctgtaccaattaactcatcatttagaattaggtatatctcctaatgctatccctcccccctccccccaccccacaacagtccccagagtgtgatgttccccttcctgtgtccatgtgttctcattgttcaattcccatctatgagtgagaacatgcggtgtttggttttttgtccttgcgttagtttactgagaatgatgatttccaatttcatccatgtccctacaaaggacatgaactcatcattttttatggctgcatagtattccatggtgtatatgtgccacattttcttaatccagtctatcattgttgggcatttgggttggttccaagtctttgctattgtgaatagtgccgcaataaacatacgtgtgcatgtgtctttatagcagcatgatttatagtcctttgggtacatacccagtaatgggatggctggatcaaatggtatttctagttctagatccctgaggaatcgccacactgacttccacaatggttgaactagttcgcagtcccaccaacagtgtaaaagtgttcctatttctccacatcctctccagcacctgttgtttcctgactttttaatgattgccattctaactggtgtgagatggtatctcattgtggttttgatttgcatttctctgatggctagtgatgatgagcatttttttatgtgtcttttggctgcatcaatgtcttcttttgagaggtgtctgttcatgtccttcgcccactttttgatggggttgtttttatcttgtaaatttgtttaagttcattgtagattctggatattagccctttgtcagatgagtaggttgcaaaagttttctcccattttgtaggttgcctgttcactctgatggtagtttcttttgctgtgcagaagctctttagtttaattagatcccatttgtcaattttggcttctgttgccattgcttttggtgttttagacatgaagtccttgcccatgcctatgtcctgaatggtaatgcctaggttttcttctagggtttttatggttttaggtctaacgtgtaagtctttaatccatcttgaattaatttttgtataaggtgtaaggaagggatccagtttcagctttctacatatggctagccagggctacagtaaccaaaacagcatggttcttgtaccaaaacagagatatagatcaatggaacagaacagagccctcagaaataacgccacatatctgcaactatctgacctttgacaaacctgagaagaacaagcaatggggaaaggattccctatttaataaatgaattgcttttcaataaattgtgctgggataactggctagccatatgcaggtgaatgaaactggactcttacctttcaccctatacaaaaattaagatggattaaagatttaaatttgagacctcaagctattaaaatcctagaagaaaacctaggaaatgcccttctcaacattggctttggcaaagaatttttggctaagtccccaaaagccattgcaacaaaccaaaaattcaaaacctacagaatgggataaaatatttgtaaactgtgcatctgacaaaggtctaatatccagaatttatatgtaacttaacaagcaagaaacaatctcattaaaaactaggcaagtgacatgaacagacaccttttgaaagaagccatacacatggccaacaaaggtatgaaaaaatgctcaacatcactaatcagagaaatccaaatcaaaaccacaattagataccatctcacaccagtcagactggttataattaaaaagttaaaaaacagatgcaggcaaggttgaagagaaaaggtatcaggggaacctgcccccaatatttcaacgtaggttcttcctattttctgtaagtgttggccggctgagaaataaagagtacaaagagaggaattttacagctgggcctctgggggtgacatcacatattggtaggaccatgatgcccacctgagctgcaaaatcagcaggtttttattaaggatttcaaaaggggagggggtgtaggaacagggtktaggtcacaaagatcacatgcttcaaatggcaaaaaggagaacaaagatcacgtgcttctgaggaaacaggaccagggcaaaaggcagaacttctgataagggtctgtgttcagtggcacacatattgtcttgataaacatcttaacagaaaacagggttcgagagcagagaaccgatctgaccaaatatttaccatgctggcatttcccaatcctagtaagcctgagggtactgcaggagaccagggcatatttcagtccttatctcaactgtatcagacagacactcctagagcggccgtttatagacttccccacaggaatgcaattcctttcccagggtcttaatattaatattccttgctaggaaaagaatttagtgatctctctcctacttgcatgtccatttataggctctctgcaagaagaaaaatatggctctttttgccctaccctgcaggcagtcagaccttatggttgtcttccctcgctaaaaatcgctgttattctgttctttttcaaggtgcactgatttcatattcaaacacatattttacaatcaatttgtacagttagcacaattatagtgatccggaggagacgtacatcctcagcttacgaagataaaaggattaagagattaaagtaagacaggcataagaaattataaaagtattaatttgggaagtgataaatgtccatgaaatcttcacgatttacgttcctctgccatggctccagctggtccttctgttcggggtccctgacttcccgcaacaaaaagggaatgcttgtacactgctggtgggaaggtaaattagttcaaccactgtggaaagcagtttggagattgctcaaaacttaaagcagagctaccattcaactcaggaataccattactgagtatatacccaaaggaaaatagagagttatacaaaaaaagacacatacactcatatgttcattgccatgctactcacaataacaaagacatggaaccaacctaggtgcccatcaacaatgaacaggataaagaaaatgtggtacgtttataccatggaatactatgcagccataaagaagaataaaatcattttctttgcagcaaagtggatgaagctggaggccgtgattctaagctaattaactcaggagcaaaacaacaaatactgcacgttctcacttataaattggagctaaacattgagtgcacatggacataaacatgggaacaatagacactgctgactactggtcaggggaagggcggaggtgggaagaggagtatgtgttgaaaaacaacctattgggtactatgctcactacctggatacagtataccatgtaataaacctgcacatgtatccccgtatctaaaatgaaagtcaaatttttttaaaggatgctactgactactgacatacagataaaccagcaggaaataattaaatggcattggtgaaataaattttaattggaaatctcattgtattagtctgttttcacactgctgataaagacatacccaagactggcaatttacaaaagaaagagttttgatggactcacagttccacatgctggggaggcctcacaatgttggtggaaggtgaaaggcatgtctcacatggcagcagacaagagaataggagccaagmgaaagggtttccccttataaaatcatcaggtcttgtgagacttactcattaccatgagaacagtatgggggaaactgcccccatgattaaattatctcccactggatttctcccacaacatgaaggaattatgggagctacaattcaagatgagatttgggtggacacacagccaaaccatatcactcatattcaacaagtatttgctgagcaactattacatgcgagacatgtgctaggtccttggaacacaggaaatatgtaggacagtctctgacctcaaacagctcacagcagagtggggtagagagacataaaaaggataataatcacacaatccattaagggatgtaatagtgacataaacaaaaaggtgaattaaagtcccagagaatggttaactttaatgcaaagcataaagctagttgacatgctctggaaatgttaaaaaaaaagagtttaaggaacacaggcctattttaccaaacaggaaaccaggaacagggagagaaggtggcttgcccaaagctagcaattggcggattgggactagaaagatccttgacacccaggctagtgccttctcacatgcaattgaaaaacctttacacagtcatgcattgcataacaatgtttcagtcaatgaaagattgcatataccacagaggtcccacaatattacaatatatatttttactcttcctgttttatgtttagatatacaaacacttaaccattatgttacagtggcctacggtattcagcaaagaaacatgctgtatttgtttgtagcctaggagcaataggctatatcatataccctaggtgtgtagtaggctacaccatctaggtttgtacaagttcactccataatgtacacacaacgatgaaatcacctaatgacatttctcagattgttggcccattgttaagcaacaaatgactgtattcaaagaagacatgaccttctctggcatgcctcttgcctgggagcagttgcaaccactgacttctactcctgagcttcttaggttgggatgaatatttgtgatcatgcccatgtacctgctggaacaacaattttataaaaatgaaaaatgtggggttgggtgcagtggctcaagcctgtaatcccagcactttgggaggctgaggtggttggatcacgaggtcaggagatcgagaccatcctggctaacatggtgaaaccctgtctctactaaaaatacaaaaaattagccaggggaggtggcgggctagtcccagctgctcgggaggctgaggtaggagaatggtgtgaacccaggaggcggagcttgcagtaagccgagatcacgtcactgttctccagcctgggtgacagagccagactccgtctcaaaaaaaagaaaaatgtgtaaacatggttatgtctaatactggaaatatgactgatttattctgcgtacttatttgtattttccaaataccataaacacttattggggttttggggcttttcattttaatttttaatttttgtgggtacattgtaggtgtatatatttacgggctatatgaaatatgttattttgtttgttttttggagacggagtctcactctgtcgcccaggctggagtgcagcgccgcgatctcagctcactgcaagctccgcctactgggttcatgccattctcctgcctcagcctcccaagtagctgggactacaggcggctgccaccacgcctggctaattttttgtatctttagtagccaggatggtctcgatctcctgacctcatgatctgcccacctcggcctcccaaagtgttgggattacaggcgtaggccacagagcctggctgaaatatgttttcttaaattttaattttaagttctgggttaacttaaaatttaagcacgtgcaagtttgttacataggtaaatgtgtgccacggtggtttgccatacctatcaacccatcacctaggtattaagtctagcatgtataagctattttttctaatgtttgccctcaccccaccccactccctgacaggmcccagtgtgtgttcccctccctgtgtccatgtgttctcattgttcagctcccacttataagtatgaacatgtgttgtttggttttctgttactgtgttagtttgctgaggataatggtttccagctccacccatattcctgcaaaggacatgatttcattcctttttatggctgtatagtattccatggtgtatatgtaccacattttatttatccagcctatctacatgaaatattttgatataggcatgcaatgtgtaataatcacatcagggtaaatgggggtatctatcacctcagcatttatcctttgtgttacaatccaattacactctttattttatatatatatatatatatatatatatatatatatatatatatatgtatatgtaattttttactatagtcacccttttgtgttaataagtactaggtcttattcattatttctattttttgtacccattagccatctccactacccctccaactaccctgtactacccttcccagtctctagtaaccatccttttactctctatctccatgagttcatttgttataatttttagcttccacaaataagtgagaatatgtgaagtttgtctttctatgcctggcctatttcacttaacataaggactttcagtttcatctatgttggtgcaaataatagcatctcattgtttttatggctgaagaatactatattatgtatatgtacaacattttctgtatccattcacctgttgctagatacttaggtggcttcccaatcttacctattgtaaatactgctgcaacaaacatggtagtgtagatatttcttccatatactgattccatttctttggggtatatacctatgaaaaagattgctgcattgtatggtagctctatttttaggtttttgagaaacctccaactgttctccatagtggttttactaatttacattcccactaacagcgtacaagggttcccttttcttcatatccttgccagcatttcttattttggcttttggttaaaagccattttaactggggtgaaatgatatctcactgtattttttagttgcatttccctgattatcagtgatgttgaacaccttttcatatacctgtttgccattggtatgttttcttttgcaaaatgtctattcagacattttacccattttttaatcagattattagatttttttcctgtagagttgtttgagctccttatatattctggttattaatcccttgtcagatgggtagtttgcaaatattttctcccattctgtgcattgtgtcttcactttgttgattgtttcctttgctgtgctgaagatttttaacttgatgtgatcccatttgtccatttttgctttggttgtctgtccttgtggggtattattcaagaaacctttgcccagtccagtatcctggagaatttccttaatgtttgctttcagtagtttcatagtttaaggtcttagatttaagtttttaatccatttttatttgatttttgtatatagcaagaaatagggggtctagtttcattcttttgcatatggatatccggttttcctagcaccatttattaacgagactgctctttcccccactgtatgttctttgcaccttttcccaaaacttagttcactatagatgtacggatttaactctgggctctctattctgctctgctgatctatgtgtctgtttttatgccrgtaccatgctgttttggttactatagcttagtagtataaagtcaggtaatgtgattcttctaattctgttgtttttgtttggaaaagctttgattcttctgggtcttttatggttccttataaattttaagatttttttatatttctgtaaagaatatcattgttattttgataggggttccactgaatgtgtagattgccttgggtagtatgggcattttaacagtattgwttcttccaattcatgaacatggaatatctttgctttttttgtatcttatttaatttcttacatcagctgttttatagtttttactataaagatcttccacttctttcattacattaattcctagatattttattttatttctagctattataaatggaattacttkttacatttctttttcagattgttcactgttggtatataaaaatgctactgattattgtatgttgattttgtatcctgcatctttactgaataattttctgtgctgtactgaataatttgctgtagtctttaggtatttccaaatataagataacataatctgcaaacaaagataatttgacttcttcctttccaatttggatgcgcttggtttctttcccttgtctgattgctctagctaggtgaaagtagacatccttgtcttsttacagatcttagagtgaagactttcagtttctctcaattcaatatgatgcctgctatgggtctgccatacatggcttttattatgttgaggtatgttccttctatacccagctttcttagggtttttatcataaagggatgttgaatattatcaaatgctttttcagcatcaatagaaatggccatatggtttttaaccttcattctgttcatctgatgtatcccattgattgatttgcatatgttgaaccatccttgcatcccaggggtaaatctcacttggtcatgatgaatgatcttttcaatgtgttgtttaatttggtttgctaatattttgttgaggattttttcatcaatattcatcagagatattggcctgtaattttcttcttttgctgtgtctttgtctggttttggtatcagagtaatactggcttcacagaatgagtttggaagtatttcttcctcctctatttttcagaatagtttaagtaggattgatactagttcttctttaaatgtttggtagaactcagcagtgaagccatgaggtcccaggcttttttttgtttttttctgggtaactttgcattaatgcttcaatcttgtaatcttgttacttgttactagtccgttcaggttttggatttcttcatggttgactcttggtaggttgcatgtgtccaggaatttgttcatttcttctttattttccaatgtattgatatatagttgctcttagtacctgctaatgatactttgaatttctgtggtatcagttgtaaggtctactttttcatctctgattttatttgagtcttccctctttttttttcattaatctcactaaagattggtcaatgttgtttatttttacaaaaaaaatcaactttttgttttgttgatttttgtactgttttcttcattttgaattcatttatttctgmtctgatccttattatttcttttcttctactaattttgcatttggtttgctcctgcttttgtttctttggtctttaagatatattgttagattgttgatttgaagtctttcttcttttttaatgtaggaacttayagccataaaatgaaggtgatttttctctgctagtatgatttaatttcttgctttttattctttctgtatccattatatgttttttgatttagggtgccatgaggcttgcaaatactgtcttataacccattatcttaagctgataacaacttaacattgtttgcataaacaaacaagcaaaaagaaaactaataaaaactccacattttaactccatccctctgctttttaactttttgtttctatttatatcttctactgtccatgtcttgaaaagttgttgtagttattatttttattggttcactttttagtctttctgcttaagataagagtagtttacacaccacagttacactgttataatatgctgtgtttttctgtgtacttaccataaccagtaagttttggaccttcggatgatttcttattgttcattaatgtcattttcttcagatgggagtagtccctttaatacttcttgtaggataggtctggtgttgatgaaatccctcagcttttgtttctctgagaaagactttatttctccttcatgcttgaagaatatttttgccagatatactactctaggataattttttttccttaagtaatttaagtatgtcatgctatgctctcctggcctgtaagatttccactgtaaagtctcctgccagacatattggggctccattgtatgtgatttgtttcttttatcttgctgcttttaagattccttcttttatttttattatactttaaattttagggtacatgtgcacaacatgcaggttagttacatatgtatacacgtgccatgttggtgtgctgcacccattaactcgtcattagcattaggtatatctcctaatgctatccgtccccactcccaccccccagcaacaggccctggtgtgtgatgttccctttcctgtgtccatgtgttctcattgttcaattcccacctatgagtgagaacatgtggtatttggttttttgtccttgaaatagtttgctgagaatgatggtttccagcttcatccatgtccctaccaaggacatgaactcatcattttttatggctgcatagtattccatggtgtacatgtgccacattttcttaatccagtctatcattgttgggcatttgggttggttccaagtctttgctattgtgaatagtgccacaataaacatatttgtgyatgtgtctttatagcagcatgatttataatcctttgggtatatacccagtaatgggatggctggatcaaatggtatttctagttctagaaccctgaggaattgccacactgacttccacaatggttgaactagtttacagtcccaccaacagtgtaaaaatgttcctatttctccacatcctttycagcacctgttgtttcctgacttttaatgatcgccattctaactggtgtgagatggtatctcattgtggttctgatttgcatttctctgatggccagtgataatgagcattttttcatgtgtcttttggctgcatcaatgtcttcttttgagaagtgtctgttcatatcctttgcccactttttgatggggttgtttgttttgttcttgtaaatttgtttgagttcattgtagattctgcatattagccccttgtcagatgagtagattgcaaaaattttctcccattctgtaggttgcctgtttacwctgatggtagtttcttttgctgtgcagaagctctttagtttaattagatcccatttgtcaattttggcttttgttgccattgcttttggtgttttagacatgaagtccttgcccatgcctgtgtcctgaatggtattgcctaggttttcttctagggtttttatggttttaagtctaacatttaagtctttaatccatcttgaattaatttttgtataaggtgtaaggaagggatccagtttcagcttcctacatatggctagccagtttccccagcaccatttattaaatagggaatcgtttctgcatttcttgtttttgtcaggtttgtcaaagatcagatggctgtagatatgcggcattatttctgagggctctgttctgttccattggtctatatctctgttttggtaccagtaccatgctgttttggttaatgtagccttgcagtatagtttaaagtcaggtagcgtgatgcctccagctttgttcttttggcttaggattgacttggcaatgcgggctcttttttggttccatatgaactttaaagtagtttttgccaattctgtgaagaaagtcattggtagcttgatggggatggcataaaatctttaaattaccttgggcaatatggccatttacatgatattgattcttcctacccatgagcatggaatgttcttccatttgtttgtatcctcttttatttcattgagccgtggtttgtagttattgaagaggtccttcatgtcccttgtaagttggattcctaggtattttattctctttgaagcaattgtgaatgggagttcactcatgatttggctctctgtttgtctgttattggtgtataagaatgcttgtgatttttgctcatcaattttgtatcctgagactgttgaagttgcctatcagcttaaggagattttgggctgagacaatggagttttctagatatacaatcatgtcatctgcaaacagggaccatttgacttcctcttttcctaattgtataccctttatttccttctcctgcctgattgccctggccagaacttccaacattatgttgaataggagtggtgagagagggcatccctgtcttgtgccagttttcaaagggaatgcttccagtttttgcccattcagtatgatattggctgtgggtttgtcatagatagcttttatcattttgatatacgtcccttcaatacctaatttattgagagtttttagcatgaagtgctgttgaattttgtcaaaggccttttgtgcatctattgagataattatatggtttttgtctttggttctgtttatatgctggattacatttattgatttgcatatgttgaaccagccttgcatcccagggatgaaggccacttgatcatggcggataagctttttgatgtgctgctggatttggtttgccagtattttattgaggatttttgcatcgatgtttatcagggatgttggtctaaaattctctttttttcttgtgtctctgtccggctttggtatcaggatgatgctggcctcataaaatgagttagggaggattccctctttttctgttgattggaatagtttcagaaagtatggtaccagcccctccttgtacctctggtagaattcggctgtgaatccatgtggtcctggattttttttggttggtaagctattaattattgcctcaatttcagatcctgttattggtctattcagagattcaacttcttcctggtttagtcatgggagggtgtatgtgtccaggaatttatccatttcttctagattttctagtgtatttgcataggggtgtttctagtattctctgatggtagtttgtatttctgtgggattggtggtgatatcccctttatcattttttattgtgtctatttgattcttctctcttttcttctttattagtcttgctagcagtctctcaattttattgatcttttcaaaaaatcagctcctggattcattgattttttgaagggttttttatgtctctctttccttcagttctgctctgatcttagttatttcttgccttctgctagcttttgaatgtgtttgctcttgcttctctagttcttttaattgtgatgttagggtgtcaattttagatctttcatgctttctcttgtgggcatttagtgctataaatttccctctacacactgctttaaatgtgtcccagagattctggtatgttgtgtctttgttctcgttggtttcaaagaacatctttatttctgccttcatttcgttatgtacccagtagtcattcaggagcagattgttcagtttcgatgtagttgagtggttttaagtgagtttcttaatcttgagttctagtttgattgcactgtggtctgagagacagtttgttataatttctgttcttttacatttgctgaggattgctttacttccaactatgtggtcaattttggtataggtattgtgtggtggtgaaaagaatatattctgttgatttggggtggagagttctgtagatgtctattaggtccacttggtgcagagctgagttcaattcctccatatccttgttaactttctgtctcgttgatctgtctaatgttgtcagtggggtgttagtctcgtattattattgtgtgggagtctaagtctctttgtaggtctctaaggactaagtctctttgtaggtctctaaggacttgctttatgaatctgggtgctcctgtattgggtgcatatatatttaggatagttagctcttcttgttgaattgatccctttaccattatgtaatgggcttctttttctcttttgatctttgttcatttaaagtctgttttatcagagaccaggattgcaactgctgcttttttttgtgctttccatttgcttggtagatctttctccatccctttattttgagcctatgtgtgtctctgcacatgagatgggtttcctgaatacagcacactgatgggtcttgactctttatccaatttgccagtctgtgtcttttaattggagcattttagcccatttacatttaaggttaatattgttatgtgtgaatttgatcctgtcattatgatgttagctggttattttgctcattagttgatgcagtttcttcctagcctcgatggtctttacaatttgtcatgtctttgcagtggctggtcccagtttttcctttccatgtttagtgcttccttcaggagctcttttagggcaggcctggcggtgacaaaatctctcagcatttgcttctctgtaaaggattttatttctccttcatttatgaagcttagtttggctggatatgaaattctgggttaaaaaatcttttctttaagaatgttgaatattggcccccactctcttctggcttgtagagtttctgctgagagatcagctgttagtctgatgggctttcctttatgggtaacctgacctttctctctggctgcccttaacattttttccttcatttcaactttggtgaatctgacaattatgtgtcttggacttgctcttctcgtggagtatctttgtggtgttctctgtatttcctgaatttgaatgttggcctgccttgctagattggggaagttctcctggataatatcctgcagagggttttcctacttgggtccgttctccccgtcactttcaggtacgccaatcagacgtagatttggtcttttcacatagtcccatatttcttggaggctttgttcgtttctttttactcttttttctctaaacttctcttctcacttcatttcattcatttgatcttccatcactgataccctttcttccagttgatcgaatcggctactgaggcttgtgcattcatcacgtagttctcttgccatggttttcagctccatcaggtcctttaaggacttctctgcattggttattctagttagccattcatctaattttttttttgaaggtttttaacttctttgccatgggttcgaacttcctcctttagctcggagtagtttgatcgtctgaagacttcttctctcaacttgtcaaagtcattctccttccagctttgttccgtttctggtgaagagctgcgttccttcgaaggaggagaggtgctctgatttttagagtttctggtttttctgctctgttttttacccatctttgtggttgtatctacctttggtctttgatgatggtgacgtacakatggggttttggtgtgggtgtcctttctgtttgttagttttccttctaacagtcaggaccctcagctacaggtctgttggagtttgctggaggtccactccagaccctgtttgcctgggtatcagcagtggaggctgcagaacagcagatattggtgaacagcaaatgttgcttcctgatcattcctccagaagttttgtctcagaggagtacccwgccgtgtgaggtgtcagtctgcccctactggggggtgcttccaagttaggctactcaggggtcagggacccacttgaggaggcagtctgtccgttctcagatctccagctgcgtgctgggagaacaactactctcttcgaagctgtcagacagggacatttaagtctgcagaggattctgctgccttttgtttggctatgccctgcccccagaagtggagtctacaaaggcaggcaggcctccttgagctgcagtgagctccacccagttcgagcttcccagctgctttgtttacctactcaagcctcagcagtggtgggtgcccttcccccagcctcactgctgccttgcagtttgatcttagactgctgtgctagcaatgagcgaggctcygtgggcgtaggaccctccaagccaggcgcgggatataatctcctggtgtgtygtttgctaagaccattggaaaagcgcagtattaggttgggagtgacccgattttccaggtgccatctgtcacccytttctttgactaggaaagggaattccctgaccccttgtgcttcccgggtgaggcgatgcctcgccctgcttcggctcatgctcggtgcactgcacccactgtcctgcatccactttctgacactccccagtgagatgaacctggtacctcagttggaaatgcagaaatcacccatcttctgcatcactcacactgggagctgtagactggagctgtwcctatttggccatcttgctatttctctcaagattctttctttattattgactttcataagtttgattattaaatgccttgaggtagtcttctttggattaaatctgtttggtgttctacawccttcttgtgcttgaatattaatatgtttccttagatttgggaagttctgttagccctttgaaaaaactatctacacgtatctcttcctctatcacttttaaggccaatataacttttagatttgcccttttgaaaccattttctagatcctgtaggtgtgctttattcttttttattctttttttcttttgtcccctctgatggtgtattttcaaatattctgtcttcaagctcactaattctttcttttgcctgatcaattctgctattaaagactctgatgaatccttcagtatgtcaattgcatttttcaactccagaatttctgcttgattccttttaattatttcaaactcttcttaaaatttatctgatagaattctgaattccttctctgtgttatcctgatttcttggagtttcctcaaaacaggtattttgaattccctgaaatgtcacctatctctgtttctccaggattggtccctggtaccttatttagtccatttagtgaggtcatgttttccagtatagtcctgagtcttcatctgtctcttaattaaatagttaagtatttattatagcttcacaatctgggcttgtttctacccatcctccttgggaaggcctttcaggtatttggaagaacttgactgttgtgatctaactgtatctgcattaagggtcatccaaagcccaataacactgtggttcttacagacttgtagaggtaccacgttgatggtcttgaataagacctggaagaattttctggattacaaggcagaaactcttgttgtcttcccttactttctcccaacaagaggaatctctctccctctccctctctctctctctctctctctctctctctctctctctctgtctctgtctctgtctctgtctctctgttcagagctgtctggagctgggggtggagtaacacaggcacccctgtggccaccaccactgagactgcactgggtcagacatgaagccagcacagcagtgggtctcacacaagcctagtgtaactactacctggctactgcctatgtgcgctcaaggccctggagctctaaaatcagcaggtggcaatggcagccaggtttgtatccttcctttcagagtaatgagttcccccaggcccttggtgggtccagagatactgtctggaagccatggactggagtcaaaaaccttagaaatctacctggtgttctgctgtattgcagctgagctggcactcaaaccatgggacacagtacttcccactctaattttccctttccataggcaggggtaggaagagggggaaatggccacaccatggccactacaactactgatccacgggaagtattgccaggctaccactagcatttccttaaagtccaagggctcttcagcagcttgtgatgaatgctgcctggtctgggaatcacccttccaagtactgggctcccctctagcccagggcagatccagaaatgctgtccaagagccaaggcctggaatcagggaccccaagaacccacttggttctctactcccctgtagctgagctggtacataaggtgcaagataaagtcctattactttcccctctgcttttctcaagcagaaggaacctctccccataatcactcccaatgagaatatgctgagtctcgcctgaagccaacaagtttcagagtgtcacccaaggttcattgcatactacctagatattgctactggttattcatggcccaagggctctttagtcagcagttgatgggtcctgccaggactgggactgggtccttcccttcaaggcagagattcccttctggcccagggtgtgtctagaaatgtcatctgagagctgggtcctgcaaagcgggactcaaaactctgactggtgccctatcctactggacttttgattttgatatttgataatggctgaatatttctcaaacgtgatgataactataaaattacaaatccaacaagttgaacaaaccccaaataggataaagtttgtaactgaaaaaaatgttggcatagcaagcaagatcaacatcacatgaaaaagacactaaagcaatattattgctagaaataaggaggcttacaactctgataaaaattacaatccataaggaaatctaaaattttcatgcatctaaggacatagcctcataataagtataaataaatttacagaattataaaaccacaattttgatggaaagttagaattgctttctgattaattacaaggtcaagcatatgaaaatttaagcatttagaaagacatgaataatacatttagcaagcttgatgaaatggacacacagagaacccaccacccaaattagagaataggtattctctttaagcacacaccaaaatttacaaaattttccatgcactagacataaacaaatcttcataaatctaaataattggtatcataccaaccaatttagagtgattaaattattgatgataaaaagataactttttaaaaatctcatacatttaggaatatttttaaaactttaaataggtcaaaaaaggataatagaaactgaaaatatttagcacaaaaaatgaaaatgctacatatcaaattgcaaaccatggtagaaaaattaatgcctgaaatttccatattatgaaagaagatgacataattaatatacaaaaaacctagtacaatagttgaaaaataataagaaatttaaaaaacaaactaatgaactagaggaaaaaataaaaggtaaataattcattttctaaaaagacacaaaccaaacttactcctggcaaaattcatcatgtaaagaaagattagatactgtagaggttaacaagagatccaaaatattatgtacaacttcaggtcaacaattttgaaagctttaggttacctgaccaatgtcttaaagacatacaatttatcacatttgattcaagaaaaagaaaagccaaatggtcactaaagagccaagaagcctgatatccaataagagatcacagccattaaagaaaatagaatgaatagctaaaaaatctctcagtcccgatcccttctgcacataccaatgcaatttttcagatgagttctatgtttaaggaacagataacatcactgttaaactgtgctagaacaggaaataacacttccaattcatatttaaaattaacataatcttgaagtcaaaaccagacaagcacagtaagagagaaaaactaaattacagctagacaggaggaataagtttcaatattctatagcaccgtaagatgactattgttaacaataatatattatacagtttcaaatagctagaaagaggatattgaatgttcccaacacatagaaatgataaatgtttgagatgatggatatgctgattaccctgatctcatcaccatatgtattgcatatgtattgcaacatcactatgcacaccagaaatatatataattattacgtgtcaagtagaaaaaaaatttttttaaacttggtcatctatctttctagtggccatagatggataatatgaaataaaatgataacaaaaaccatcagtttagagcagggatcagcaactgctactcccatgcccattttggccagcagagtctgtttttaaatggcctacaggctaagaatttttctcttatttttaaagatttgtttagaagaagtaaaacaagctacagagaacaactagtgcctataaagcctaaaatttttactatgtagccttcacagtaaaaattaacccgaattagagaaaaattttaaaattaatctaatacacttggtgtccttgtaaaaatggggaatttggatacagagacaggaacacacgtagaacaccatgtaaacatgaaagcagatattggggtgatgcttccacaagccaaggaatactagagactgccagcaaaccaccagcaaccagggaagaagcatggaacagatgcttcctcacagcccccagaaggaaccgatcctaccatcaccttgatttcagacttcgagcctccagaactgagacaatagatgtattctctttaagtcacttgttttggggcactttgttatggcagccctagaaagtgagcatacatttctttatcaataagaaatgaggcagtgtattagagaacaatggaggatctgcctagataaaatggtaacagaaaatcttcctgtaaatggctaatttgggttgaatgggaaggataagaaagatccagtcataccaagagtttggggcagaacattccagggagagagaataatgtggccaatccagttaaggtagggaaaggtttatttaaaactgattaaatggaatgataattaggaagtggaggagaggtgatgatatagattcttcagccttttgaaggataaatgattagcaaaaacagaacacacaaagtcaaatttgtccacaaaagttttgaagtcaccaaagccatgctcatggtataggatcctctgataactctcagagacaacttgccatgctcaaagtattgtcctcatagggaatatgctacaatcaccatttccggggatatcagaataataaaatcgcaaattcattagaaagtttcgaagccccaatcttttctccaaagtcttctttttttcttacacaaacacaattttattgtcacaccttagaagatttaccataattcaacgcattctaatattcagtccatatttaaacttctccacttttccaagtgtgtcttttacagattttttratggaataaagatccagtcaaggtgttcatattgactttgagtatgtttctttagaactctctcccgtctgttttttgacaatggagattattttattcaagctattatagtagagatagcattcattaatgagaagcatctcaagtaaaagaccaggggacttggggctttttaaaggcaggtacaaaaaggagtcatattcactgagaaaggtagaagtcagycatatgtaggaacatgtgagagcagggtagcccattgtagttggtcagttctagaaacttagaagcataaagagatttctctgctatcgctgcattttagggaayacagcattcagattaaattcaacattatcacatttaaaaagaattcatctagaatattatatattgtatgatcaaatagttctgtttttatcatatggatacagagagtgttcagttatcctaatgctatttatcactatggaggtccatccttcctccatcagtttctcaattttccattctatttcattggactgtttgtctacccttgagttaatacattgtgtttaattattatagctttataaaatctgttacacatgtgcttaaaaaaagtatccaattgttgagtgctgagttatcaaagtattctttacaacatctctgataaggtatcctcactgtctaaatattctctgtgtgctcagcatctcaaagcacagcccattctctttctcagctctaacttaaaaagtccattttgaataggtaatctaggcatatggcacaacacttaaaagccaaaaaaaatggtttacagtgaaaattaagtttccctccttccttgcccctcaccaaatagtttcccttaccagagacaatcactcttaccagcaaacttcatgcatttataaacatacatgtaaattttatttttgcaacacaatacgagcaactatagatacatttctgccccttgatttctcccttgtaatttccatattggtggaacagaactgttcattcctttttaacaggtatatgtatcgttttctaccatggttctaatttattgctagattctctctttactgggttgagctgtgcatctctgtactttttcttccccgtttgtcttttcttttcttgaaaatgaggctaatttcatttgcactctgttgacctcctacatgaaggaaatttccctacagtaactggagggtgacaaagtgctctgttgccataaacatctgcaaaagatggtgaattctagaaggcaggatggcatattggtcaagaatacatatttcccaagattaagtctttactctgccatttacagataagtgaccttgaataagttactcaaactctgtcytctcaattacctcaactataaaatgggaataaaaatagcatctgtgtaaatagggttgttgagtggattaaaaacatattagtcaaacgcctagcacatgctaagagttcagtccatgttaatcattgttgttgttcctatcatcattatcccccccttccttagacaataaagatcatcttcccaagacctcttcgccaaagttctgaaagacaaacagckgtaaaaagaaaccccactctcagcttgcatttttgttgtctgaaccttattccctaggttctgggggataaccttatgtgtgtgttttcttatgaaggaaagatggcaggatctgtctgccctccaaaactcagcctgctagcttgtttttcagatgttatgctgattgcctgcttaccttgatctgtgtcaggaacacagttgacctttatctgggtcaggggagtgtaattggactggcaactctctttacatggaatccctctgtgatggttaattttatgtatcaatttgactagactacaggatgcccaggtatcyggttaaacatgatttctgggtgtatctgtgagagtgtttccagaagagattaacatttgaactggtggacagagtaaagcagatggctgtccccagtgtgggtgggctttatacaatctgttgaggaccaaaagagaacacaaaagtggaggaagggagaactcactctctctkcctgatgccttgagctaggccatgggtctcctgcccttggactaggatgtacattattggttctgctggttctgaggccttagggcttggaaccactggctttcccccatctccagcttgcagatgacagattgcaggacctcttggcctccatcattgtgtgagccgattccttatagtaaatataaatatgcacacacatacatatcttcttggttctgtttctctggagaaccctgactaataccctctccaccctaaatctggagccggctgctcacacacataaacagcagtcaaacacagacaagataacaagagcctctggggcactaggggccactgcccacaccgtgtaaatgctcttaagtgcctcacatttcactgtacctggggccctggcaggcaggcggcgagacaggtttctggctctggagaatgtgggttagtcttggtggcccttccaggtgagcgtgacccagttagtgtagtaacccagaaatgtccacatgcgtgtgccaaacctgaaattaacagcattctgggcagctctggttcaatttctaaaatgagcagacagcttaaaacctcagtgatgatctaaatagcttctttaagacacacttaattcagatttaacaagacaattaaatttaacaagatgttgttaaatacaagtgattgtttaatgtggatacgctgaggagctgccatgcaggagacacacattattattaattactgctaaattatttttgtcatcagcacataaatttcaacatttcttatcagattagtatacttcatgtgcagaatcctaaaaatgatacataaacaatgatatatagtctttaaagctcttctttctccaacaaggagaataaaagcaaacacatgtaatatatagacacatacaatgtgccaagcactattctaaacacgtcacaaatttagttgacccttgaatagcacaggtttgagctgcacgggtccatgtatgcacagcttttttttggccaaatacaaattgaaaatacaatatttgagggaacccatgtatctggaaggccattttttggtacacataattctgcaatactgacagcaggactttggtatgaatggattttggtggtggggggttactgaaaccaatctcttgcatatatgcagggacagctgtaatccaactagccttcacaataacatcatgaggtgctactgttttttatttctrttttatttataaggaaaagtgagtcataagatgcacacatatcccaaggtccaacagttgtgaagtaatggaaccaagatttgaactcaaaatgactgaatctggagctcacagtccccactgtgatcatactctctgcaagatgattgcaaatttgcaaatgtgtagttttcaaactccagtctagtttgatactaaagggacatgggtctttggatctatatgaacctgggttagaatcctaatttaccagctatatgactatgggctcataagcctgttttccccctctggaaaatgtcagtactcatccattctcacatgtaagataatgcacgtgaagatcctagcacaggagctgacacatagtatgaactcaagttcatttattagatatttatagaacactctctatattccaccccagaagtagacactgaggaacaaatgatgaacaaaacagtacaacatagttcatctatttatcacatacacacatatgagtatacaattgagaccagacaactgctgagaaggagaagtgcatactacaataagactgcaaaaaggggactttgacaaagatgaaaaatgtttcctaaggaagtgatgactacacaacacacaaccctcatcccttatagaagtagctatttggccaaatagatctgcttatctctatgtatgggtgcaagggtaggacatttgacttagttttgtttttgttttgtatttttgcactsaatctgctctggaacacaggaggacatcagggcacagtaactccagttccagtcaggaactggagtcagaaatttgatttctgcctccccatgaatcctacaggggcaacgttgaaaaaaaaaatctgtgttgacctcctctagcatagtctctgacatctaagaggcactcaataaataccagttaaataaataacaaatataaatcatggggaaaagattctgagattgcatagcacctcacattatccagagctctttctcagtattaattaaggagagtttagtggtaggaccaccaggtttaaattattctaccaagtacaagctatgtgaccttgaacaagtaacctctttttatttattttatttttttgagatggagtcttgctctgtcacccaggctggagtacagtggtatgatcttggctcactgcaacctccacctccggggttccaatgattctcctgcctcaggctcccaagaagctgggattacaggcatgcaccaccacgcccggctaatttttgtatttttagtagggacggggtttcaccatgttggccaagctggtcttgaactcctgaccttgtgatctgccctcctcagcctcccaaagtgctgggattacaggtgtgagccgcygtgcctggcccaagtagcctcttcctatgcctcagttgatgcctctaaaaagtaggttacaatgaagcttaaatcaaataatgtgtaaagcatttagcacagttcctggtacgtgataatcttcatggcaatgttaactggggtagtggtcaacagcagtgatagtgtggtttcttaatccatatagcacaacctaaacagttgatgacaacatcctccttcaacaaaaaggaaaaaaactgaggtttagagatctaaagttatatagctagtcaagcccaggtcagctggttccaagcccaccatgccaagtgagccaacagaagccttttgaacaggagcatgtcacggagaaagcccatgatagcaaaagtctgcccagggagcatgtgcaggagagtgagktcagctggaagtaactccttccttctgagcaagcagctgacaaccttatgttgtcccccaattatctcccctcctgcctttttytggaatrgggatgggggatgaagaatcgtgaaactgaagagaaacctcccacttgagctcagcaagagaaagatgagaagaagccagacaaaagcatccccacacacactctgatactttgaatcctgacacagcagcggttgcaagtctgaaaccaagctgccccctaatgtacagtctccacattcaggaggctgaagccattagcaactaactttaggctggaagaaatggaaaagaactcaagtgccttaagcagtaggtatcaggctctccatgtgaacttagcagtgtcccttaccatgcattttgarcttgtctaagtcagggtttctccccttcagttctactgatgttttgttggggagatgactggtgggaaatgttctgtgcattcaccatagatgtttaacaatatcgcaggcattgtctcatctagatatcggtagacttccccaggtgcgacaaccaaaaatgcctctagacattgccaaatgtcctctgggggacaaaattgcttccagttgagaaccactgmtataggttggcttgaaaacaggcaatggttttaagttaggcgtgttcttgattttttcctcaggtaatgtcagcttacaaattctttacaaattgggacaaatcaggaagcccttagcccatcccgttgactactgtggaagaaggcagtcatgaggtggtcatcttcctcagcttatgttaggcttttatgccccatctatatttttaggaaattgtttctcmgcacctaatgtgaactggtattaaccatttccagagaggcaatctgaagggaaaagttgtcgcagaaatcccttcaacgtctcaaccaacacctctacagacacagctggaagactgcagcagatcaatgggaactctacyatgctggcaaacgttcatcttgaccatcatgtttgctgcctgcatccgataaatatttcttgggaagatcttctttgctaggcattatrctagatgaggtgggagatgctaagatgaagaaggcattgttcccacctccagakcttcccaatctgtttcgaagaaccgtgtgggaaggatcacgtaaacctcttttaactaagctcaaagcctgaacttggaatccaggtttcgattctgtctcattaactggtgaacttgggcttggcctgtatattgctagaggtccaggtgagtggttgagctcttcctaggcattgatttgagttagaactcctgtcgtctttacctggatacctgatttgggggagaatgggttcagaagaacaaagtagtcatgcatttaatacatttttattaagcactgctatgttcaagactgtgctactctggatataggaatgataaagcatattcaatccattccctcatggagtttgccctctaattggaaagatagacattagatggaatttgcacaaaataaatatgtgattgccattttgtagtaagagctgcaaaggaaaaatcagacatctcccagtcactcagcctggctgtagtctgaggctgaaggtgataggtgatacaaggagaggctaatggagctgtttacctggaggacttcgtgagagatgagcataagtaaaggcactgcaggatcaataagacagagtggaacaataagttgcagagagggacagtatctgcagtatttctataaagtagcgtcattttagccccagtagggtttgtgtctttggaagcttcgtggacagagaatcagtgttcacagaggaccctggcagctggaatgttggatgaatacatcgttagtggattcctgggccacagatatcaaggaggaggccaaagttgcatcrgtgtatgtgaaactccacaaagagctcctgaaaataactctaggagattttgagggctggcaaggattctacagcatgtcaaagggaccaagagccagcaaacagtrcattacaaacctatttaataagaagcaaaagaaagacctgggtggaagggccctgcagggcttcaaatgaaagggaaatttcaaagcttcctggaagagtaggcctatacctcagccttgaagtatggatgttttaaatgtgtttcttaagctgatgtcattcttcccaaatcacagctagaaaatactttctgctcagactcagcaaacactgagaagcaaaggggaatggcctatctctgtggaatccagtgaagaaagaaaccaattatattagccaaatcccatataagtggagactattaaacaagatccaagattctcccctggcaagaatatactgcctataatttatcagtctgcaaatatttattcagcatgcactttgtacaaaacactgtagttagaactccagattataaccctaacaatggctaacgttaatggatcaaattccacctataccacactttagctgtttaacaaaggacaagtttctgacttctctgcttttcaatggtcacatttgtaaactctttgcacttagtaaatgctacagtaattattactattatcattatgattcttgtaatcatcattataagccagacagtattacaggatttcatttaattttaataagattgacatttttattatttccattttatagatgaggaaactgaggcttagagagattaagcaactaatcgaagttgtttagctactaagttgcagaaccaggatttaaaccgaggtgtggactccaagttcatactttactaccctgaaatgacagaattatataraataatgtatatgaagtaccagccaagattatgacactcaataaatgacagcctttcttgctgctgcttagcttctggtgatggccggctacccttggtgttccttagcttgcagacttgtaactccaatggtgcccattttccttcttaaatgatatgaagaatatgcaacatttggttcagtaactggcamtgagtgctccaactcaaaattccttgttacaactggtaaagactgaggttcaaattcctaatcaggaaacttttcatcttgaatggatgagaactatgagtgaatccatcaattttaaggaagaaggaaaattattttctccagaactctaatacgctgaraactctaaatgctgccaggctgcagaaagctgtgcactccagaaccttctagcttctaccctatttccccatttggccattcttcctcctaagttacctgtttttccccaagtgtcaggtgctagcattcatgaatggcaaaattcagactgtaaatgttcatctgaatccagtcatccattgatttttargttcatactgaagtggtgttgagaattagaagaaacatgctctctcgccctcaaataagcacttttcataccaatgtcagcaaagcaaacatcagcattaattaacagtgactttgaactgtgtaatgttttccattagaactgaagagggctagaaggaggaggacaagggacaacacatggcgtcaccaggtatctggggaaaagggaactaaatttataatgcagaagtagactgctgcttgcttaaaaatagaagggacatgttttgaaacctcaagtggttgatggtggagacggttaaatcagatgactaatctcccagtgtgccacgttgtccctgctcagagggcagttacatggtggaggacactgcaaatggcacagacattgtagccttggaaagatgtggggaagtgttctgagtccgaggacttctttttactcatttgagacacatttttaaaacacaaacctgaaaaaaaaatcagcttttgatacagcctatcaccctgtgatggatttccatttcactaacgatgaaacagtcttttcatggctgggcgtggtggcttaggcctgtaatcccagtactttgggaagccgggcaggtggatcatctgaggtcaggagttcaagaccagcctggctaacatggtgaaaccccatctcgaataaaagtacaaaaattagctgggcatggtagcacatccctgcaatcacagctacttgggaggctgaggcacaagaattgcttgaaacccgggaggcagaggttgcagtgagctgagatcataccattggactccagcctgggtgacagagtaagcctttgcctcaaaaaaaaaaaaaaaaaaaaaaaatagagaaaaagtcttttccttgacccatgtattagtttcctagggctgccatgacacatcaccacattttgtggctttaagcaacagaaatgtatttgttcacagttctggcagttagaagtctgaaatcagagtcagccgggccattctctcttcgaagggtctaggagagaggagcctttcttgctgctacttagcttctggtgatggccggcaaccctcagtgttccttagattgtagacttgtaactccaacctctacctctgtcttcatggggccttcttccctgtctgtctctgtctttgtctctgcatctgttttctcttcttgaaaggtcacaagtcattgggttagggcccactctactccagtataatttcatcttaactacatctgtgaagacactatttctaaataaggttatatttggtcattccaggtggacttgaattttaggaagacgttttccaacccaatataacccccttcccttccccaacttcaccagctgagctctagccacagtggagtcccctcagttctctgaacatgtcaaactctctttcccaccttagtmcctttgaacttccaagtcctctctgtctagaaatgcaccctcaccctccccaacctcctcagctcttggyttgactggatccttctcacccttcaagtcttggtttaaatgtcaccacctcaaagaaaccttcccttgcccaccttatctaagctccttgttttcattatctcttctccatttccacacttgtttcttttctctttttttttttttttctttttttcttttcttttctttgcatgacagggtcttggtatgttgcccaggctggtctcgaactcctgggctcaagcgattctcctgcctcagtctcccaagtagctcagatgacaggcatgtgtcaccatgcacagcttcttttcttgtatttagcatcaaatttagtaccatgttaatgctttctctctctctgtgtgtttgtgtttgtgcattttcttagctttctcattaaaatgtaggtttgaacaccagcagttccactagtttgttccctcctagtttgttcacacagcatcttatgcagtccctctactaaatgaatagttgtttagtaaaacaaaaagatttgagtatctgttatatgaaaggccaaatgctaggcacttagggaacatggaatatataaaatatagcccctactttcaaagtacttagactggaggcaagatcggcagtggaaacaaatcattctgagatgtgatgtaagttcaagaagagagagactgaaaaagtgctgcagaagcaactcacaataaacaatttagcaaagctagtggtctcgggagtggaggaacacaggtggggataaacttgcaaagctgctttcagagcaaaaggggagctggtactgatgcaaaaagtgagagtaattcgttgtgcatgcatccataggtaacctccagggcmcttgctgtatctgtgggccggacacagtggagccacgtgcagtgggtatctgagcccagctgttgtagcaggcaaggcaatcagggaagatgcagccaaggatgcctttcccagccaggggttcctgggccctggtttctccacaggctttgaaactagatgtgattagtgagttctgaaaccccctgacaactcagggggagattttgctgtccacccttgggtgcccccaagcagctggaacagaytgtatgtggaagttttctctagattcctgcctccttccctacagttcccaccctaagaagattgccgtttaagctccaggttaaagaaaatcctgatattcctggggcaaactgcactcaatttgtttctctaacagacagctggcttggaagagccaccttttctccctttcctccccctcctctggattcccttcttgtcctccaagtgcaggtgggaggtacctgtgtgaggagtccactctcaagatcctcccttcccataagagtctataatagacaagacgtcagaggggaagggaatcagttgtggtgcaacaaatattaaaaggaaacttttctctgcaatttgctgattagaatcaaatgccctcctggaggaatgagatcctttggaagggcgcgaccagcttgtaaatgtgtrgcaagaagacaatactaccgctgggggtcctagggatgtgatgggccttgtaccctgaatgcatctgggaaagaactcatttagaaggcactatttttgaaggttgagagatagaatacaaagaaagtgcttagcacagtggctgctacttgcacacaaccagttactgtcagctactgttacccttcctactactattatcaatgttaatgttttcacaacgttcgtagtaagtggaactctccatagcttcttggacaagattgagccctttttaaatacttgctgatgtattggctaaagggacttggagagggtgatggagacaaggaagatgtggatagctggaaaagagagttctcagggaaagagggagaagtagcggtggccatggagaatggaatgtgaatggtaaattcttaagaatgctttgtggtatgatatacataagggtgtcctccatatctgtttttactctaaatatacatcaattgttaaagttcttagagttggtgtggtgaggtcactaaatgtggtgacagtaaagcctggcctcaacgtggggtctgaactcagggggcagratgacccccagtcacacctgtagtacaagtgaggactgtgtttattttctagggctgccatataaattaccacaaacttgttggctaaaacaacagaaatgcattctcttacatttctgcttgccagaagtctaaaatctcacagagccatgcttcctctgggggctgtaggggagaatccattatttgactcttctagcttctggtggctgctggcattccttgagttgtgaccacatcacatcagtctctgtttctgtggtcgcgttgccttttactggatctcaaatctccctctgcctttctcttataaggacacttgtcattggatttaggacccacctgaataatctaggatgatcctctcaactcaaaagcctgaagttaatcacatctgcaaagacccttttcccaaattaaaaaaaaaaaaattcataggttccaaagattggcacatggacatatctctttaggggccactattctcacccctattcattgtgactatcctggagctcagaaatgagtgaattgctgcaagtctcagtgctagaaaacaaaggggccaggtacagaaaccttaggacagagatgggaaatgacttacccaagagagtacagtagacaccaatctgagtcaagasttctctctactccagtcttcaatggttttacccatatgcatgataatgtgggaatttcctataatgttgggaagatattcttgtctaggtagctgtgaaactttaagaaagatattttgcaattgagatatcctgtttgagactcagctcaagatattctttttcttttgattaaggattttttttgaaaagatggtttgtaaaaagataaatgaaatagcttrtgtaccataccaatgctgaaatggaaggataatttccatttatcatggacctccaaccttacagtcagtgagaagcatttatctttttacacattcttycacttattcattcaacaaatattaagggtactctgccaggcagtgtgcatagtgctggggagacaataaataagtgagacaaatgcatttcttgcatttgtggaatataatacaatatggaggaaacagacaacaacaataacaataaagagtgctattttgaaatttggaaattgctattaatgaaataaacattgtgctatgagagagtatattggcaatgatactactttaagtagaggaataagaaaaggtctgtgaaatttagatgagacttgaaggaatccattgggcaaagaggctggagaaggcatttcattccaaacaaaatgccttaagaggcaaggagtttgatgtttttagaatagtcagaagacccacgtagccagaacttacaactgggtgggaaaagtgaggcttcctctgttgcaaaaaggcttcctccatgtgccaaaatgtaccaccrcagtttactccaggattatctcatcccagcccagtgatgacaaatcaaagaacttctatcttctcctgttttctaaattctaaatccctaaaaagactttgattggctttggtttaagtcaagtgacttcacttgaaacaatcactgtggccagaggaatgcaattctaagaaaagccggacctggattgcctaccttccgctgtggtcagcagccccatcagaatcacatgattggagcagcaggaaatcagttgtccagaggaaacaggggatgcaggacagacaaggcagtagacattcaccatcctgctcaaaatgcagcaattcattaactgctcccctgatccttacaagcagcracattgtctgtctaattcattactgtgttcctcatgctgaggacagttcctaggacatattagctcctcaaaaactgtcaattatatgtgtgggatacattaaaagaatgacattttattaccataaaaaaattacagtcacatgtcaatgacagggaaacattctgagaaatatgtttttagacaatttatcctgtactaacatcacagagtgtacttacacaaacctagatggtatagtttactagacacctaggctatatagtacagcgtagtgctcctaggctacaagcctgtacagcatgttcctctattgaatactgtaggtaattgtaagacaatggtatttgtgtatctaaatacagaaaaaatacagtgaaaagatactatgaaaaaacatttttaatggtacacttgcattagggtgcttaccatgaatggagcttacaagactagaaattgctccaggtgagtcagtgaatgagtggtgagtgaatgtgaagkcctagaacattactgtgtactactgttgactttataaataccatacacttaggctacactaagtttctaaacaaataaagtaattgcaatacaatgttgtgacagccatgatgtcggcaytaggtgacagaaatttttcactccattgtaaccttacaggactaccatcgcatacacgatccattgttgatcaagatgttatttagcgtatgactgtatttacaatataaatacttcataatggatagttaaattctgttacaccacacaattgttgaagagtgttggtctacagagtggaaatactaaygcttaagytgcattacttgccaggcttctctgataattaagtgctattcgattgtaaaaggctttggaacatattaaaataaaaatacatacagacacaaggcattttattgttaatagtcagctaggaaatgmatgctcagcagaattgtctaaataggctcctaaagagtatggcaaaaaaaaaaaaaatggaactttgaagagaaagtttcaaatggcaaaaatacttaggcagcaaaaagacaattttctaaaatgatgggtttgagaagaatgaatcaacaataaatgttggtgcaaaacattatttaagaattctgaacatactcccgattaaaaatattttcaagagtgactccagcagaaataataaaatgctaggcacaaacctgttgccttagccctcctggctaagcaggatgcaagagcctgacccacacctccatcaagtgctctgaagtgctttgagagcatggcatgtgtgtgttcagttgagtgttttaggtcatgtcattttagggttaacgtcaccctcctggaaaaggacaggtagaarggaagccagacttcgacccacaggccaagagtgaccaattacattgatcatgtggatgaattgaggcacaggtaaactgctaccctggagactaagtaagcagcttagaagagagagtgtgtgtatcctcacatccaaaggtgggtaggcaatctagggcaagtagacagcagcaggtattcctgagtcacaagctggctggttggctctgccatccttgacatgtgggttccatctctgggtccaaggtgactgctgtactgttttcagccaagagaaaagaagtgggggaaagagtcctggcaagcagaattgtcttcagagaggtgactcagaacctgcaaataccatgcctgctcatattccagtggccctaacacagtcacatggttccacgtaaccacaaaagagacttgactctgaagtctctagctgcacaaccaacatacccagataacacttagatccaggaagagggtttatttctaaaataaaaggaacaatrtggatactggggaacaagatcacattctctgatatgtcacgcatatattgagttcatgctgtgtttgaggcattgtgggaaatacaactgtgaataaaaggatggcctgcattccagaaggcagtaaatacgctcacatacagtagcaatgcccacataaaatggagtgtgacaaggggtacatagaacccagtttatgaaagtttagggagggggggatttatttcctctgagtagaatttaggaaaacttattggaggaggtaagatttgaaatgggcccttaacactgcataggactaaggtagactggaaawtggagttaggagaaaggactgtaaagagggagagaagagcctttggtcagtgggaagggaaaagctttcatcccagctagagtcattttcatagctgtggccctttgagaaccatccagtaatcccacaaaaatgaccacacgaaggctgatactgtcagttttctctccaagtccattctcttatttccttagtgataagaatcctaacttttagttgagtgtattgtcctccttagccttctatagagccatatgtgatcccgtgaccaagttttggccaatgaggtagaagtgcaagtatcataaacagctactgagaagtattcctaaggcaacagcttcctttgcactttcttcatcctgctgcctgtaattgaggtgtgatggctagagctctgatggccattttggatcagaagaataagcactaaccctggaagtaacagcagaaagtcagaatcatccttctttcctggtgacaccatagaaccaccatggtggaaggccctggactgcctatctccagacttgtttgaagccaaaaggatgactttaggtgttyaagtcactgtcattttgggttttctgccatgtttaatgacaccaattcctactgagcacaggcaggtttcaagccgcacttgctcctagatcacacttaccaatgaatagagattcaaccaatagtcagcatattaatttcctattgctgccctaacrtattaccaaaaacttagaagctaaaaacaacacaactttatttatcttacagttctgtaagtcagaagtccagcatgggtcctactagactaaaatcaagatgttggcaaagttgtgctcccttctagaggtgctaggggaaaatttatattctttcttacttaggttgctggatgaattttgttccttggcagttgtaggactgcaggcccatatttcctttcttgctttcacctgaggtctattcccagcttttagatgctgcccaggttccttggctcatgacccccttcctccatcttcaaaccaacaacagtggatccagtctstctcactttagatctctcctcctgcttctttcatcatcrtgtaactcatcagcrcttctgcctgcctctttcaccttaaaggactcatgtgattacactgggccaacccagatgatccagcatcatctccgaatcttaaactctgtaaccttaattccacttgcaragttccctttgccatgtgatgtaacatattycccaggtctggggattaggacatgggcatcttcagggagccattattctgccagagaatacaaggttcccttggcaacctcatccttttgtcaacttatgatcttgtttcaactgtcctcctcatttacaggtgcaataacacaaagggtaatttctccttgatacttatatatagccctgacagtcaggactcctacccagttctaattctcaggaataaagcagtgtctttgagcgatacctcatatatcttgggagttgtgcaccaactcataaaagacacctaatagatgtttcaggggttaggtttaaggcagaatttggtgacttctaggagtagttttctcaggtagatgtgaactgggaaccagggttaagacgagggtttctctctaactttcctcagagccagacctaaaatagcctaatcaacactgaaaaattacttaggtttcttgagtgggttgcaaagaacaacttctttacaaacttttttcaagttgcaattgaggataggattggaaaatacatgtatcatacccaaggcagtaatttcagagagaagagaaaagataaaacaaatgtcctttaaagaaaataaggtgacagggtaccatccaaattgtctgggtggaactaggcaaaggtcagccaatgagtagtcctctgggggatcaacttggagattaactctggcctcattgtactttctcctttgtgcactgtagaggagggaagcgcttcagtgttaggtccctgggacagaagctcgaagaggataaggaatttgcctattttgttttctttacacccaatcttcagaatactcagcaaacatatacagtatttgcatgaatgaatgaatacattgttgattgaatgactgcttgattggttaacagatacctaagtcctcctttggttccccatccccaaccccctgctgggctatattgcctagaagttaaaccttgtgctttagaatgagacatgaacctaggtctcacctccactatctattctgccaatgtgttccctgggaacttccttgagtctgtttcctgtctgtaatctgtagccaataattacgcttggcattgtgaaatttcattaagataatagatgcaaagtgcttagcacagtgcctagcagtacagtcatgtgccacaaaatgacatttcggtcaacagcagaccacagatacaatagtggtcccataagattttactaccatatttttattgtaccttatctatgtttttattgtaacttttctatgtttagatacactacttactattttgttacaatgacctacagtatttagtaaagtaacatgctgtacaggtttgtagyctagtcacagtaggttagaccatacagcctaggcatagagtaggctttaccatctgggtttgtgtaagttcactctatggtgtttacacaataaaaaaatcacctaatgatgcatttcttagaacatatcccttgttgcatggctgtactcaaatttgttagcacttaatgttagttcaaacccacttctactgctaaaggggtctcccggtgatggtcaaactkaattcccagcctacatgcctctacttgaatcaattggcctgtctcaccagcatttcatccacatgtatgggtgcatgtacatgaggtgtgtgcactcatgtatgcatgcacataaatatcaaggggccaaagtaaatgtaaatgctatcttctccatgaagccaactattgaggccctagtcagaattcatctctccactttagaatttttgaatgtcgattaagccatctttgtatgtatcacataccgatgcctagcacagtgtctgccataatatagaaacctaactgtttctatattcatctgctcattcattttggatgaatgagtggatggatggatggtggatggatagaaagttaacttacttatgttctctggcagctccacagggatttatttatccttaggcacacaactagtcagcacagtgccttacccactgtagctattcactaaatagtggttggatggtgataaaggagaagaaaaattagaaaaccaagaccaatccccacctggaatcattctcctttcagggcattctattgaaaggagttattgagaagagaggcagggagttgacagccaccctctggactctctcccagggcctttttagaacaggaaagttaattatggaaccagattaacagtttcttttttgatacagccaaagtaaaaccagcaggatgcaatttagctcttccccactttccagatagcagcaaattttcatacaaaacaaagagacacttgaattgcaaattacttagagactcagctagcaaccccaacggaagaatatttctactttcaaaatccgctgttgcctttttaggtttaaccatgtagtgggaccttcacaaaggcctgggcgtcttgctgtttcaactgttggccaagtggggaggaggagcaattcattaaggtttactggaatgtcccagggtgagctttttgctcagaacattttcctcttctccagactgtctgtctctaactctcagagcaccagcctctactcacagaaatgagggctaaagggtttctagaggtcatctcactggagagtaggaaaagcaaatgcctataatggcaaggggaatgtaacaaataaaacaggtggtgaaggtgaatgtatgacctctaggaagyagatgaggacagggkcaaaactttaccccatctaaccatcactggaccattagtgattgttgctagacagttccaacaagtctgtaatctggattgttaattgaaacgttcttcttagctgttggcatctaattaataagggggaataataccgtctattagctggatacggactatggggccaccagtttataacttctgatctagcacacacggcttccttatttgatagacagggaaaccaaggtcaagagacagaaataaaagtataaaagatcacagagtgtcccaatcttctgacacctcctccagtgcctagctgattccaccatacagcctccccaaattcctgcccccsacgcaggacayggaagctttactttcacaagagcatttattaacttatttttctgatttaaataaataattcctattttctacagaggacttggaagatttaacaaggataagagaaaattaaaaagtctcacagcagtgccattttatttatggaggaactggaggctaagatggaaacctagctggacccaggctgcttccagacacggccactggagggcaaggtggcatctcagttggcttagccaacaataacaggttgtaggaaggttagggcaggggttgaaaacacagccaggtacgtggcagaagtgagtaaaggaggacagatcaggaaatacggtgaacgaagtaaatgtgccctgcctgaaccctgtagacaccactcagattcagcttgtgtccttgtgtgggaatgcaaataatgttgacagccttttggaattttttaatgtgaatcttgaaatctaccctttttaagtaaaaattttcaatgtgtgaatgtagttcaaataatgtgtgtgtgtgtgtgtgtgtgtgtgtgtgtgtgtgtgtgtctgtgtcaaaacccttcaaggagcaggatttgggctatggactttctctttgtgaactctgtttagtgactcactgagaatgaactgggccctaggcaggtcagtcagctgggtggagagtttgtttgtgattagtcacaggccaccagagagctgtcatgcagatgaccaaaatcagggggacaagactgaggaggccgaggctgtccattgacttagttcagctgtcccctggagagtgagggcttcaacaagaaccaggctgcatcttggacagaccctatagggagatcttctgcccaaatctaaagcacctaccgtggccttttatagagtatgtgtgtgtgcatatgcatgtgaataatctttaccttgctaaaataatatagattatctcccttggtagccttgtggaagacaacttcattgtctccaaagtggaaatgtttaaagtcagtaaagttagcaatgagtgtgtcaactctttcctgtaatgagttactgtaatgaattactgaaagaagttaggcagtagaatggaatggagggagccgttgaataggagtcttgaattttcccaccctgccctctctcttgagcttctatttcatactctatgaagtgaaaattatgatacctgccctgttttctatattggtgaggatttttttaaaaagaaaaacagaaaacccaatggcttaagaaaacaacaaaaactagcctaagcagagaagggtatgtatagttcacacaagtgaaaagttcaatcatagttaaatctgggggtccaaataacatcaaagctaggtacctctcactcaaaactgcagtcttgatttcccatgttggcttccagcagctctgggtctccatcttcatcattgcaaatacagtagaaagagaccttctactacattttcaacacaagtttcagaactgactttcattggtctgaaatcccatatccattctgaaaccagtcaatgtgacaaaaaagatgaaatgcactgagtggctggaccagcacacatttcatggagcaattaggcatttagctgaggatctctgggaccataatttgcattctgtatggtggcagataaagtagcagacctgattccctggcagaaataaaatgtttctactgaaacaacttcctgggaatctattccacttgctctataaagtgtgtctaaagctaaagccatccagttaaagagaaaagggcaaaatacttgattattgctgatactaaaatgagattgtatattttgtatttcttttctgtcctgtgtcrtgcaggcttcctttgacaagagaatcagaaccgactggtgacatttgtttcaatgaaagcaacagtgtgaagagtaagtagtttttcctattattcatctcactcagtggagataatgaactcctctccactgccaagatgagaaactaccatttcttacacatggacacaaagatgagaacaataaacactgagacttcaaaaaggagggaaggagaaagaggagcaagacttgaaatctacctatcaggtactatctttacttcttgggcagtggggtcattagaagcccaaaactcagcatcactcagtatacccatgaaataaacttgcacatgtaccctctgagtctaaattaaaaaaacaaaacaaaacagaacaaaaaaaacaccaccgctatctcttcctccaacccagtaaaataaacgtcagctgatctggtatgtcagatgccaagtaaatggtttaaactttctccattgtatatattccccagacaacataggacctgtcaaattatatatcacttaagatgtgctattggctgcaagtaacagaaagtacagattcaaggtggcttaaataacaagaaaaaagttgttggccctcataagaagtcccaaggtaagagaggtccatagattgtcaatggagtaaatcagtaatattaccaagacttggattatgacctcttcagtgggctgtctctttcmtcagtctccagcaaacttcctctcacatttattggccagaaatgtgttacacacccttgcctaaaccagtccttagcaaagcaaatggaaccaccatgattggtttagaataactgttagtcccttcttgatgttaagaatgggactcacattccctgaactacatggttgtgtggagaaaaggggatatataaacaaaactaaaatcttattagaaagaaaaaaggaagaaagaatagtgattgtaaaggcaatcaatagtatctactataagatgatactatgaaaatctcagcagtgcttcctctaagaggaaagcttataaaggtactcaagttctaagacctcacatactccatcatggcagagaaagcaggcaccagccttggctaacctcccctctagtcatgggtaaaatgaaagaaatacttagactctagatataaaacccaaggcattatcattataccatatgcagactgtttctccaatttgcataattataaactccccctcaaagagtaaacatcactgccaacttaaaaacaacaacaacaactacaaataacattaaatatgcattgctaatttgactttctaatttgtctgggctcttcacaaagatgtgcataactccgcagataccaactgcttaagaaaatcctccacctgcctgaaaaggcatcaacaggaaaagaaaagctaaaaattagttttttagataagaatttgagttgttgcctgaaaattacctgcagtagttcattctattaaaaaggactcycaaattcattgtcccaagcattgcttaccaccattcaagtataggcaattgctttgtgcagccaaaagaagataattttgcaagatctcaccattcagttttaagagtctcctgtgagctgtgtatggccttatatttggtcatttataggaaataatccaagagtttcagaaagacttttctgtctcaaaatctgtcttttattgatctgcctcaaagatccacaccacttgggcttcgaagctttgagctatagtacaaatatgctacctggccaaggtggattaagctattattattttcctcaatttcagttccctgatgagccgcgatgataagtgggacacaggatgtgtatatgcatagaggcaagtccttctgcaagaatggccataatcaaaaaatgaaaaaacaataaatgttggcttggaggyggtgaacagggaacacttctacactgcttgtgggaaggtaaactagtacaaccactatggaaaacagtgtggagattccttaaagaactaaaagtagaactaccatttggtccagcaatcccactactaggtatctacccacaggaaaagaagtcattatacgaaaaagatacttgcacacacgtttatagcagcacaatttgcaattgcaaaatcatggaaccaacccaaatgcccatcaatcagtgagtggatgaagaaactgtggtgtgtgtgtgtatgtgtgtgtgtgtgtgtgtgtgtgtgtgtgtgtgtatcatatatatatgatatatatatcaaccatatatatcacccatatatatagtatatatatgatatatatcgatcatatatatgatggaatatatatatgatatatatatatatatgtgatggatatatctatccatggatatatccatggatagatatatccatcacatatatatatatatgatgaaatactactcagctataaaaaggaatgaattaacagcatttgcagtgacctggatgacactggagactattagtctaagtgaagtaactcaggaattggaaaccaaacgtcgtatgttctcactgatatgtgggagctaagctatgaggacacgaaggcataagaatgatacaatggactttggggacttggggtgaagagtggaagggggacaagggataagactacaaatatggtgcagcgtrtactgcttgggtgatgggtgcaccaaaatctcacaaatcaccactaaagaacttatgtaaccaaactgtaccacaataacttatggaagaaaataaaaaatttcctttgaattaaaaagtyctcctggaggaggcatacaacttacatgtgtatatgtaatttgtaatatatgtgtatatatacttctatataatggaaatacctgttatgtataaacacataacacatatgaatacaatgttacatagtgagatccttttatacaagctattctcaaacccgctttgtgaactcaatattatagatatctttcctttgtagtttgtgtgtgtgtgtatgtacatgtcattttttgccattgattagtattgcacctcaggaattaatgataatttctttactcaatcctcttttaaactatacctgtcattcttagctatatcatyactatttttaattacatcaaaacattcttctgcacagagatatttctctgcacatattgctgtctctttagtaagctccttgaagagtcattgctaggtcaggtatgggagggaagaaccatagaggactagaatattgatactgcatgatcccttctgggggctcagatacgcctgtgaggctgggctcctaaagtgagtgagtgtgtgtgtgtgtgtgtgtgtgtgtgtgtgtgtgtgtgtgtatggaggaagaaaatgggaacaaagtgcaataaatgtaaactttgctgatgccacatttttacaccgagttgttacagaacaataagaaaactgctgttattgcagacaaccgttagatttgttttagtgtttacttcagcaacgtctctctgtgccttgtctaaactgtaaacaccctgtgggcaggagccagttctggtggttgttgctgttactgaccaatatataccaagtgtttaatatatttacattactgcgtttcaacattttttggtgaaagagtgaataaattatatagaaaatatttcctgaaaggaagagatttgcaagaaacttcctaaagagtggcatttctagggaatctattatcttcccaatctccttactcaacccccagtatctcttttgtatataatactttctatcccacagcaattgaaatgtagaaccatacaattttaggcattactctactgttttaaggcaaaaaataattctgcctcagaaagtattgtataaggagcaggttgtagtaaatggaccatccttgtcagtcaagagtttatctttaatgtaaaccactcaaccctggcctcaaggtcaacctatttttatggccagcatttgatttatttttatattttacttccatttttaaacaagataggttgctgtgcaattatgaaaattaaagtaggaataaacttggacatgtgactttatactgaattctatagattgcaaaatggatgggttctgttatgttgtgccagtatgagttgctccaaaacacactggaaaatgaaatattttttctctttccataaatgatatttatttgccttttctatttccaaagatgttttctatcatatcattcaggatcttacctaagtttcttgaattcttgtcatccttcccagagcagcaagggtggttttcaatttccctaactcacttaatgtctgtctggagttctgtgcccaccaaaagagctaactgaacaaayaccctgtacccatcacaaaccgacaacaccacaggctcctggacgtagagcagcattgacctaaaaatctttcaaacatccccaaggcaaaagggcgattgctatttggcaattcaaagtgagatctgcagaccaacagcatccacagcacctactacytccttagaaatgcagaattctaggcctcacccagaccatcctactgagtccaaatatacattttctcaagatccccatgtatttcatatgcatgttatggacctaaaggacaattccttgtggtcattcacctggatttcttcttattttcgagagwtctttctgctttaaccaacaaaaagaagcacataaatactaagagtacattatttaaatagcccacactattattgtactgggcaaagaacacatttcatactgagttgaaggatatgttccctatttcaaaacaacagtttactcctttgacaatttcatcattttcatggcaacttcccctccattccttcatttgttcaaaatggcagcccttaagatataaacatgctattactyttatgcattgaatttagataaatataacacatgtaacacatttactatgaaatcaaaggaaaaagcctccctagaatgtagtgcagtaaaatctgtagtcactttaatgatgccatctcaatttatagacctgagtagatcatgaattctaaacaattgctggaatctaaaagtatctattgaaattaagaataaattctcttgtgggtgagtaggaaaagtttcaggagtgttcagttcaggaatccagttattacacagtacactggggtaaagggggaaaaatgttcctggaaataaccccaatgagatgcacagatagaagtgaagttgttagtgtgatcaaaggagatttaataactatttttaagtctggaaactattttctagatgtttaagtctgaacatactaccttagagttttgtatgtggttaatctcaactgcctgcatttctgaaacaaatgcattgttagtattgtgattaaatgatgctattgtataaaaaagaataaattatgttctatgaaatcaccaaaaaacatgtatatttatatggcaaccctataaaaaggctaaatcatggtttaaaaagagaaataaggtgagcttccatgctcccagcttctacttctaggcttatctcctccattctcttaaggtttccagtactctcagtctctctcaccctcctctagaggaaaatctrttcttgaaatgaaatgtcagccatttatattttgtatacattcaaagatttgttctaataattagcagtactatctctcaccatgaaagaatttgtctcccattaaaggaatattacatattagagtaaagagatgataagtactgactagattagaattggttttatctgaacagttgatagcttcctgaactttagtgttagtattctgagactgcatctggattcaccaggagaaaatattttataatcagtgatgtctaccatgtgtatgagataaggacatagccatacatctgctatgtaatatcccataccacagcttttactgagcttgtatacagcatccattgttaagtacttgcaagctactttatttgtctattgatgaatatcaaattatctcccccaaattaactgccttaaaagaataatacacattatcttacagtttctatgggtcaggaatctttgagcagcttacctgagttctctgtctcaggggtttcctacraggacacaatcaaggtattagccaagactgcaggcccacctgaagrctcaactggggaaggatccacttccaagctcactgacatggtgattagtcacactcagttcctccaaggctgttgcacagagggtctcatttcctcactggccattgtccagagatttccctcagtttcttgccagcttgccctctcctttagggcatatacacaagaagagtaagagaggtggttagcaagaggaaactcagtcttttgtaacctaattatagaagtgacatcccatcacttttgcctaatatgttcactgatgtaagtcactatatctactcaaggccagaggaagatacaagggtgtaaatcttagggggtaggaatcagtgggagccattctgaatatttaggttgatttaaatcttttccttttatatacaatgctgcaataagtatatcctctagagaattgttttgaaaagtacttggctttcactactggtgtttagtagcctttttgtgattatataaaaaccacaaagtcactgctagggccaggttggggatagtgacattaataacaggaacacataaccagcttctgcacacctcctatgtaattctctgatcattctccctttgcttcaatgctgcacagacttyattccattccctctttaccacggtcactcttaagacgcctactactattatcccatttttgcaagtgatgaactagacatagagaagcagaatcactcactcagggtagcacagctaataaggaacagagcttggatttagacacaaatccacctgactttaacactggtgttattgccactgtgcctttcgcctctctggaattagtcgataaagtggtctcctaaatattttgacaacgtacccctattagcaataacttttcagaatatgcccttactatgtgtatatgtatttataacatatctgtaattttaaaaaagtcaatatttttggataaaagtgatcatgaatagaagttattttattcacaccacagtggattgtcttgcccagagctgatgctctctggatgtgacatcctctggtccatgacttcctagatgacaatcaagtgggcttatgggatagagttggatgcttctgctgcccagatacttaaaaaagagggggaaaactgactttcagcctcttctttgctctattatgagtttttgaagaaatactgaatgagtaggagtttggacaacttcttcctttcactttgtgtcatcaaatctcttcaggaaggrtattggaggactggagcagtctttcttccatccttggagctgtggtctccactgtgggagaaaataaaatgcttttaaatgctgccacctcactgggattgagtgaatgaggaaagttcagatgctgtttccaagtgaagttttatactttatgaagaactatttattatggctttaaarttatttatgtgtttactttagataatacgtggacatggtaaaaagcatgtttaatgcattatgaatatttactgaaaattaagctttctgtagagactgtctacagcctctctacttttctcccctaaagcaaccactttgtatgtgtgtatccttccagtgagagtctatatccatacaaattcacatgtggatgccccttatttttttataacctaagtgatacacccagtctctgtaggtggtttttttcacctgttacttcttagagattgtgttatattagtatacacaaccattacttattcytcttaatggccacataatattgtatagtagaaatgtacmaaaatttatgtaacagctccttatagatgaatatttaggttgatttaaatcttttccttttatatacaatgctgcaataagtatatcctctagagaattgtttcgaaaaatacttggctttcactggtggtgtttggtagctttttgctgattatataaaaaccacatagtcactgctggagccaggttggggatagtgacattaataacaggaacatatagccagcttctgtacacatccggtgtgattctctgattattctcactttgcttcaataattggtatcttagctgaacaagccccacaatgctaccatgagagaaaggtacttgtattaggtgactttgctggaagactagagaaattaatgctccatcttccatctttggatttcccagtgcagctgtgggaagcaagtgtaggaactcttccatggactggcyagcaggatttatctattaataggagggtagggcagccttgagcagtgatagcacagtgtagtaaggacagcatcagcttcaggtcaacatatttaacttgtgtgggcagttccccaaaccaagatactgtcaccagaaaatggagctgtggatgctggcctggcacaagccatgggtgcccactttaggggttgttcatgcagacccttcatcagagacccttcattgccatcccttccatagctctgaatatccttgttactctggtcgtctttcctcactgggattagatgacctcaaagatcctatccctctcaaactttcccccaactttataatttgccatcacatcagggaggcagggtctggctcaggcacctgcctttacgttgttttatccccatttgccagatcactcagctccccaaaagtgtcaacctactctttcccttgccttcctggttggctgcctgtggaaattactagcaagtgtccgactaaaatcattctgaagacgtgtgtttgcttcaatttttaaatcagtatgctggccagggtgtcaaaaacacacagagaaatctcagcctctgagttctgactgggctttttcaagtatggacatattgttataagcrtagagatgactaggctgactgaacctttcccttgggccaagtgtcacaggaaaaacttattaataacaaaagcagtagcagaggctacattttgagttcctgctttatcccagagtctgtatgaggcatagagcatccacagagtatgggaccagtctaactggttggaaacctcatctccatcactcagtagctgtgtcaacctggtacatttcttgccctctgtaaatatcagttacaccagctacaaaacagagcagtaattgcacctacctcacagggctgctgtgaaaaatcagacaatgtagcccctgggacatacctagccagtgcctggcatatagtaagcacacagtaccagctgactaattttatagctgttcctgaaagattgtttctcctcatttcataaatgyacraactcagaatccaagaaggtaartaacttgcccaagaccaaaagtagcagaactgggactygaacttaggtcatctgcctcattaattcttcaaatatttatgggtgcctcctatgttccaagcactgaggatagggaaataagtgagcaaggcacaatcctggcccccatggattttacagcctgatatgataccatcaaatcccttgacatgcctgccatccattcccttcataaagctgccccaagacacctagttaaaatgtccctgaatactcttgacagtaaccacaatagctaatatttataggatactagtgggtgctcatttaatctctccaaaagccctgtgaggcagctacaatgattatctcctttttactggttaaaaatctgaagcttaggcagaggcaggtgtatcatgaagtcaggagatcaagaccatcctggctaacacggtgaaacccccgtctctactaaaaatacaaaaaattagccgggcatggtggcgggtgcctgtagtcccagctacttgggaggttgaggcagaagaatggcgtgaacccaggaggcggagcttgcagcgagccgagatcgcgccactgcactccagcctgggcaacagagcgagactccatctcaaaaaaaaaaaaaaaaaaaaaatctgaaacttgcagaaagcagaatgagttcttgaacccatgtagctagtaagtggtggagcttggatttgaacccaggcaacatacaagaatagttcattacgttgtttaaaggagtcaagctgacttgagactgggattggagatagaacaaaaagttatgtcagtgctgtagtccatatccaatcacatataaggtgcatcttatttttctgtgccctatgctcctatagtaatcctcagaggttaaaaaacatatatactaggaaggactttcagctgtgaaaacaaagcaaagaaagcaggcactatcaaattaaaatcaggcagtgggactttgactaaatctgccttcctgcactctgcttagttgcattttcaaagacctctgtcctcgaggggcaagctttgttaggatggccagtggcagatacaggtctacttcagcccctggaaatagagtttgacttggctgcgtgcagacaggcatggcctggggagacgtaggccagggcaaagcccaggggtctgactgataaacacggccacggctagtgacttctgcagagctgctacagatcacgaacagagttgcgttcaaaggagtcaaacaaacttcagttctgcctccctgattcagaagattcatctgaatctccataggagcctggtgggtccacggaggcagcgatgctggcataagtaaaatactagcagcatgatttttccccatttgctggctttattcatggctcatagttacactccctccagtgagggagactctgtgcaaccctaagacactgtgagattgttaactgggagtaaaaacaaggcagaaaagagaggccccctgcagaaaacaaagaggccttgcccttcacaaacagacaaagccagacgcagctggagcctaagtttgtgtctctgttacttgcaaaacrtaacacccagcaaaatacagagactagatttgtatttttgttcccaacctgaaattaagaaatctaaagcaataagtccttcgtggaccaggtttccacctgcctcccaacacataagtcacctcaggaaaatataaagaatggtcccagactgtgccaaggaagtggggcacagttaatagagccaaatctggcaaagcacataattctttgccaacagcttgcagatatgatgtctccttaagcctcaagtcaccaacagagggtgtttttaactcattttacccgtgtacaaattctgaatatcaagaaagattgagagatttgcctaaagtcatgcaacaatttgatgaaagagaatcagaaccctggatatccctggttcttmggcacacttagatttcagctgcttctccgggggaaatgtgataacgcctggaggctgctttgcacagccagtacaacctgtggagaactccgtcctcattagctgtcattaagttgccgggacctccagttgctcttcctatggggcagaactgaagaccaatgtcatttactttgtatgtccacctcctggggttacactggaaacgcttctaatgaaccacagcagaagaaaacatcatcctcaattagagcccttaggaaaaactgctgcattttcctacctgcagaggaaaacactaaatcgggagtctgtatatgaataaacagaggagaagaaaatttacaagtgtgatgactccgcaaaagctcccctgagtctttacaatggcaaatgacccatgagctttcagagccaccatattagttttttgtaaagtagcttttgttgttgttaatgaaaacacgatccttttacttagattctgtgatcaaaggagctaggaggtcagggtgcacacaataagactgtctgccaggcataggaatatccacataccttgtaactgctcggtggaacagaggtgggatgtttctggtgccctaaaactctttcacccagaacttgccactacactgctgaagaataaatggtagcagagtggttaagagtcaagtcaaatggagtttaaggcctagatctgccacttgcttgctgtgtgatgttggaaaaatattaactgctccaaatctataactcttcagctattagccgctctggagctgctaatatacctaacaaatagcatataaattatttagctgaataaatgggcaatcttcttagtagtattagtatcattccaacacagctggaaattaccccagaaaccacctcgccaagacagtcccaattccgactgaacatcagcatcacacaaggtgcctttaaaatatgcatgtggctggtacccagacttcctacccatccagcctgttttcaggctctcggcatcatgtacctccctattcctttgataagccattgcaaagcctgtctaaaacaaagctatttgcttccattagctaagactacgactatttttcaacatgtctgaggaacgagaccaggcttctctacttttcaaaactcctcaggtgattcttagcaaccagattagcatcagtccttagaacaacctcagacacccactaacacatgccctagagaggctaagtaacccggaggtcacagaaccacagagttaattaacaaataamgacaacaaatacacccttggtgttcctgatttccgtcaaatagccgccttgctgagtcagcacaacaaaattctaaaaattagcagaatagttttcgtggttggttgtcttaagtgtggtccatacagtcctggtttttccatgtgtcagcaactgtttagagctaccaacagatttctccctaaagacttacactgtgggtttcagttagaattgcaaacccagagatatctgggaatctgtctgagttaagcatcgctgacttgccccagggaagactggctttttaggacaggggttccccaacccccaggccatggatcagtaggaaatgggcagcatagtaggaggtgagcagcagatgagcattactgcctgagctccaccccctgtcagatcactggcagcattagattctcataggagcacaaaccctattgtgaactgtgcatgccagggatctaggttgctcgctccttacaagaatctaatgcctgacgatctgaggtggaacagtttcatcccaaaaccatcctcatgcccccacatccctggaagaattgtcttccacagaactggtacctgatgccaaaaggttgggaactgctgttagaggacacaagaccacagtccaggtatcacagccacatcccacagacaccacctcccgttggcttcctggatgacagkcacagtgttcaggaggaaatgagcagataagaaaagtcaacctggcacataaacccacaagggatgatacactttgcaggcatcatctgagggtagtattaagaagagcttgtggagaaaagggaaaccttgcacatacactattattagaaacgttgattagtggtgactgtggaaaactgtatggaggttcctcaaaaactaaaaacaattaccatatgatccagcaatttcacttctgggtattaacccaaaagatttgaaatcagtatatctaagagaaatctctgctctcacgttcactgcagcgctactcataatagccaagttatggaagcaacttaaatattcacctgtcacacttcaaatctctcttgcaggaaaagcccttggaggggcttccccgattagtcggccttatccaggctaacctctgtcttaaggtaaactgctttgggaccttaaatacatctgccatacccctttccagcagtacctagaatagtrtggaacygaayaagtgggagacagtatgtgtgaaacaggagccaggaatcttgaggaccatcttagaatccttcctaccacagatacatttttcttaccaactctggcttggatcaaagcaagatgggacagagagctaaggtacaacatgagcataatagttaataatattgtattctatactagaaatttggtaagagtagatttaggtattcttaccacaaaaagtggggagagactatgtgagattatgaatatgttaattagcttgactatagtaagcatctcactatacctatgtacatcaaaatatcacgttgagtttcttaaatacacacaatcaaattttttaaggacatataccttttataaaagggacaataaatttatgagaaatctaccttttattagcagctcatgaagtaattctttaaagattattctcattattctataatcataccctatatgtgggacacccaagactcttcagccagcacttagaagaaatggaagttaaagatgctaatgatgctgtattattagacagtatttaggaataatcccaaatactcctcagcatgaggtgtaagccacttaaccattttatgcctattttatcacccctaaaagaaagagatgaatgtttaccttgtaaggctgatatgagagtttaaggatacattttgcctaaatgattatgccagtgaacatccatcatttcttacaaactcaccacctacaggcactgtgcatacttctgagggtattgtgatataatcgaaggtgtgtgactttataactgaggccaaagccttgactcaaccccagttccaaccctttcagcaaacgtattcaccactcagagcctcagtcacttttgagggtggtgagaaaaaggatagaaaataatgtgtagacctagtgtatggtgtccacccaatatatgctgagtatgyaaatacctacgctatagaaattgttacaccatcattcaagtaacaccttcattatttttgccagaattgcataccatctattcagtagtttacttaatactatttagatcaactattttaccatctgttcagtgatttacttaatactatttagatcaactattttacatccataaaaacatggttttgatgtgcttatttcatttttttctaagaccgtgttaaaataagtgctttgctattaaaataaaagtacactaaccaaaattaccatgtgtactaccaaagataaaaataccttgcaytgggaaatgtgaaaagccacttttaaatgaaraagagtgttccttagggttcctgaataaataaattgggagctacccatatttcaaataacttaattttgttttttgagagtaccatggaattcaattcatctgatttttaaattaagcctaaggaaaaggaaaaaaaatgtgttcagctaaaacgaaaatataccagggccagaactcgtgctcagatatttgcaattccaaggcccgtgtttttcataacataacaaaataaatggaggaaatgagaaggaggcagatgaagaggtggggtggggaagagagtaaagacaaaattgcagaggaagggcaactagccagtggcatccagaaagacagaaacagagccagagaaagcaagaaaggcagagagagagagaagagagaggatagagagggacagagagagatggaggcagaaaaagagagacagagacacagagagaaagagacagaaacaaagaatacattaggaggaaagggggtaggatttggtagattcttaagtgattataaacttttattatcaccccaaacactggctctcgtgggctttaaaagacagttacctcctatcacttctctttgtacattatttagttgatcaatagctcttcagctgttctcttaagcctttagaatccaggtgacatggcatccccttcgggcaaaatcatgaactgtacgacttgtttatcattagggcatgtctgactttttctgatttcaggatctgaataaatcaagctgggatccttaactctaagtctctgcttttggtctgattgtgctatggcaatgstactaattgtactatggcaaccgactgaaaatgatgttgaacaagagaatgagatggtttccttttgactttccttttactgctaagtggtcctcaggaggtgaatttcttgcagacatttgctgctacaactagaattaaattttctgcctttgccattttctgtcccaagaagcaccacagtgctgcctgcttagtacctagggaagagcactttcattctatattttaattaggccctgacatctggtatggactgtgagtgcttatttgcacacctgcaggctattggctgtaaaggcgcccagcctatgtggcrattaccagtgcagatggagattgcagtcatttaatttaatagagcaattgtgtgggccttgtagaatgtaccacaattgtgaaatgtgggccccgtcccaattccaggtatcctgtgctgttccttatgtaacacgcacttcactctcctgtcaatcttkataataaacacagtcagaagacaggattggcaacmaagctgtctttgaaagctttcaggtgagaaggaagagagctgggtctctaggaaagaattaaatttgtaaagacaatggaatttgccaaggatttaaaaaatcactaccctcctctgttaaacaaatacccctatatggctccaactcatctatggaaactctgtctttcagtgtgcawcaaatggtatacatggggcactgagaaggaagcagatgtaacaggagatggtcagcgtggccttgtgtgtacttgtgtttccatgacatggggaagaccccttacttgctcagtactgaaaaatgccaactccagactgaggctcctgttttcagagttcacctgtcacactgtttcatttacccctgtgttctgcatccccagtacctctcccagtgtccaacatactgtgtgttctcagcatttgtgaaaagaaaagagaaacagtaggccaactgtgccaaatccctgatgcccatcagcttcctgaatgcatctttctggatgttcttaaagctttgggcccaccctgggtaacttgctgggaaatccacctatcaatatattctctggctataaaactacgatgctgttaattggcttatgttgtttcctacttatttcttgcatgtctgtgtcccagttcttttaggttttagctgagtaggcagggcacttataacatagtggcaaatgatataaacagaacaatgcctaatgccatggtactgattaaaatttgagaggataggaattctctatggacctggaaagtgaggatgaccttgctttagatcatgatgtatgggcagtccaagaaattgtggaagtgttcaagaagaaaggcaatataaagtagttaacagcatggattttggacaggcctagtttacacacccagcttcaccatttttcagccatatgaatttaggtacatggcataatctgtctaaatcatagtttcttttttaaaaaatgagcataattgtgaggatgccacgtgacttctagaaataataaagattaaaagaagcaataggcgtaaaggatttagcaaaattctagacatacagtaaattaatgctttaaaattcatgatgatgatgggaagaaataagaggaagatgacaatgatggtaatgaccaagattccagggtaggttggcctgactggaggaaaggaagagactacctacctcgggaaggagttgggagtgaaggaagtatagcatcaggtagggtagaggaacagattgaagaaaacctgaaagactgagaaatactgagagacagaaatgttcgggagagaaagagaaaaaagtttacttccaataaatgcaagggagtcagacttcagaacaaacacaaaacayccatctttaagggaatatatggaaaaattaccaaggataccaagtttacatttgtctactcatagtggaaaaacagctttctcatgcaattgccatattcagaaggatcaagacatagccgcagtcaccagcatagcaagaatccaggattaaactgcttttgttagggagccaagctttatgtgaaataattaaagttcaaataatttgaggaccagaaccagtcagagtaacctgttattttggggggggggggggttctgcacacatgaccctcacaccatattggaagcaaagtgtcatttttttgcttctaccaaagtaatatttataatacattctatggcaacagataattccaatatgaggactttggattcagagagactttggttcaaatcgcagaattaccattaaatagcactgtgagctcagaaaatacgcttaatatctctgaagcacagtcgcttcatttggaaaaaggggatgaaaatatctctcctttctttttatggattaaaatataggtaatcattaagcatagtgcctgacacactgggagtattcagtcaaagacagctgcttttctcaggttgcccaaagcgtgacttcctctgattgctcaagtgacatggggaaaatacaaattcaaagaagagaatattgacttatatcaagcttgtccaacccgttacccagagcagcttagaatgcagcccaacacaaatgtattaactttcttaaaacactatgggattttttttacttttttttaagctcatcagctatctgttactgttaaagtattttgtgtgtggcccaagacaattccttttttttttccattgtggcccggcgaagccaaaagatttgacatccctgacctagatgatcctgggagcctggaacttctccaccaagcttgaaaaatcccccaaagactgagtaggagcaggtgtcaaactgcagctgccttgaccatgatctaggtgaagctgtgtgtgtgaaatagcaccattgtgcccacagtcatctgtagcaaaatgagaaaaataaagaaaacgtaatattttttttctaaagctaattcttttaacttaagggatgattatttattctaagatcatgtccttctaacttttttaaattattattcaatcgttttgggggaacaggtggtatttggttaaatgtttaagttctttagtggtgatttctgatattttggtgcacccatcacccgagcagtgtacactgcacccaatgtgtagtctttatccctcatctccctcccacccttcaccccaagtcctctgagtccaatgtatcattcttatgcctttgcatcctcatagcttagttcccacttataagtgagaacatacaacatttgattttccattaccgagttacctacttagaataatgttctccaactccgttcaggttgctgtgaatgcctttgcttcattcctttttatggctgagtagtattccatggtgrgtgtctgtgtgtgtgtgtgtgtgtgtgtgtgtgtgtgtgtgtgtgtgtgtgtgttctctttatccactcattgattggtggacatttaggctggttccgtatttttgcaattgcaaattgtgctgctataaacatggatgtgcaagtgtctttttcataatatgacttttcttttcctctgggcacatacacagtagtgggattgctgaatcaaatggtagttctactttagttctttaaggaatctccatactgttttccacagcggttatactagtttacattctcaccagcagtgtaaaagtgttcccttttcaccacatccacgccaacatctattttttttatttttaaatgatggctattctttccggggtaaygaggtatcacatcgtggttttgatttgcattttcctgataattagtgatgttgagcattttttcatgtatttcttggccatttgtatatcttctcttgaaaattttctattcatgcccttagtccactttttgatgggattatttgtttttttcttgctgatttgttcagatttcttgtagattctggatattagttttttgtcagatgcatagtttgtgaatattttctcccactctgtgggttgtctgcttactgataatttcatttgctgagcagaagctttttagtttaagttccatctatttatctttgtttttcttgcatttacttttagattcttggtcatgaagtttttgcctaagccaaagactagaagagtttttctgatattatcttctagaatttttakggtttcaagtcttagatttaagtatttgatccaacttgagttgatttttgtataagataagagataaggatccagttttattcttctacatgtggcttgcattatcccagtaccatttgttgaatagggtgtcgtttcccccattttatgtttttgtttgctttgtcgaagatccrttggctataagtatttggcattatttctgagttctctattctgttccattggtgtttttatacgagtaccatgctgttttggtaactgtatccttgtaatatagattgaakttgattaatgtgatgtctmcagatttgttcttttttgcttactcttkctttgactatgtgggcctttttttgttccatatgaattttagaaatgttttttctagttctgtgaggaataatggtggcattttttatgggaattgcattgaatctgtagattgcttttggcaggatggtcattttcacaatattgattctacccattcatgaatatgggatgtttttacatttgtttgtgtcatctatgatttctttcarcagtgttttgtagttttccttgtagaaatctttcacctccttggttagatatattcctaagtatttttactttattttttattttttgcagctatcataaaaggggttgagttcttgatttaattctcakgtcagtcactgttggtatatagcagtgctactgatttgtgtacattaattttgtatcctgaaagtttactgaattcatttatcagatctaggaactttttggatgagtctttagggttttctaggtatgtgattatatcagcaaacagcaacagcttgacttcctctttgtcaatgtggatgccctttatctctttcttttgtctgattgctctggctaggacttccagtactacgctgaatagaagtggcaaaagtgggtattcttgtcttgttccagttcttagggagaatgctttcaacttttttccatttagtataatgttggctgtgggtttgtcatagatagcttttattaccttaaggtatgtsccttctatgctgattttgctgagggttttaatcataaagagatgctggattttttcaggtgcttttttctgcatctattgagatgatcatgtgatttytatttttacttctgtttatgtggtgtatcacatttattgacttgcgtatagttaaaccagccctgcgtccctggtatgaaacccacttgatgatagtgtattatctttttgatacgctgttgaattcagttagctggtattttgttgaggatttttgcgtctatgttcatcagggatattggtctgtagttttgttgttgttgttgttatgtcctttcctagttttgggattagggtaatactggcttcatagaatgatttggggataattccctatttctctatcttttgggataatttcagtaggattggtaccaattcttctttgaatgtctgatagaattcagctgtgaatttgtctggtcctgaagtttattttcttgacaatttttaaattactgtttcaatcatgctacttgttattggtctgttcagagtttctatttcttcctggtttaatctaagagggttgtatatttccaggaatttatccatctcctctaggctttccagtttaggcacaaaaaggtgttcatagcagccttgaatgatcttttgtatttctgtggtaacagttgtaacgtcccccatcttgtttctaattgagcttatttggatcttctctcttctttttttggttaaattccctaatggtctattgatttcgtttatcttttgaaagaaccagctttttgtatcatttaccttttgcatattttttgtttcaatttcatttagttctgctctgatctttgctatttctattctgatgggtttgggtttggtttgttcttgtttctctggttccctgaggtgtaaccctagattatctatttatgctctttcagactttttgaagtaggcatttaatgttatgaactttccttttagcactgcttttgctgtatccgagaggttttgataggttktgtcactattattgttcagttcaaataattttttaatttccatcttaatttcgttgttgacccaatgatcattcaggagcagattkttaatttccatgtatttgtatagttttgaaggttcgtcttggagttaattttcaattttatttcactgtggtctgagagagtacttgatattatttcgagttgcttaaatttattgagacttgttttgtggcctatcatatggtctatcttggagaatgttccatatgctgatgagaagaatgtatattctgcagttgctgggtagaatgttcttaaatatctgttaagtccatttgttctagggtatagtttaaatccatcatttctttgttgactttgtcttgatgtcccgtctagtgctgtcagtcgagtaccraagtcctctacaattattatgttgccgtctatctcatttcttaggtctagtagtagttgttttacaaatttgggtgctccagtattaggtgcatatatatttaggattgtgatattttcctgttggactaatccttttatcattatataatgtccctctttgccttttttagctgttgtttctttgatgtctgttttatctgatataagaatagctattcctacttgcttttggtgtccatttgcatggaatatctttttccatccctttatcttaagtttatgtgagtcttcatgtgccagataagtctcttgaagacrgcagatayttggtgaattttaatccattctgccattctgtatcttttaagtggaacatttaggccatttacattcaacattagtattgagatgtgaggtactgttctgttcattatgctagttgttgtctgaatactttgtgggtttttttttcattrtgtcattgttttattaatcctgtgagacttatgctttaaggaggttcattttggtgtattttgaggttttctttcaagatttagaactccttttgccatttcttgtagtgctggcttggtagtggcaaattctctcagcatttgtttattttaaaaaggtgttatctctccttyatttataaagcttagttttgctggatacaaaattcttggctgataattatttgttaaggaggctaacgataggaccccaatccattctggcttgtagggtttctgctgagaaatccattaatctgataggttgttctttataggtttcctggtgcttttgtctcacagctgttaagattctttccttcatcctgactttagataacccratgactaygtgcctaggtaatgatctctgcgatgaattccacaagtgttcattgagcttcttgtatttggatgtctagatctccagcaagaccagggaagttttcctcaattattccctcaaataagtttttcaaacgtttagatttcttttcttcctcaagaaaaccaattattcttatgtttggttgtttaacataatcccaaatttcttggaagctttgttcattttttaaattgtctttgtgggattaggttaattcaaaagccttgtcttcaagctctgaagttttttcttctacttgtttaattctattgttaaactttcagtgtgttttgcatttctctaagtgtacctkttatttccagaagttgtgattgtctttgtgatatctatttctctggagacttttccatccatatcctacatttttttwaattttttaaagttggayttcacctttctctgatacctcctttagtagcttaataatcatccttctggattctttatctggcaattcagagatttcttcttggtttggattcattgctggagggctagtgtgatcttttaggagtgttacggaaacttgttctgtcatattaccagaattacttttctggtcccttctcatttgggtagaccgtttcagtgggaaggtctaaaacttaaaagctgttgttcagattcttttgtcccacagggcaatcccttgatgtggtgctctcctgctttctctagggatggggcttcctaagagccagactgcagtgwttgttattgcacttctgggtctagccacccagcaaggctactgggccctggtgctggggaatgtaggctggtgctggcgaatgtctacaaagagtcctgtgatgtgatccatcttcaggtcttccagccatggataccagcacctgctctagtggagttggcaggggagcgaagtggactgtgtgagagtccttggttgtagttttctttagtgcactggttttcttgaatgctgattatgctagcagtgaagttgtcatgtggacatactcaggacctctggttagccatggtgttgcaggcagtggaattagctgtcgtttttyccttctttggaggagggtggttctgttctgagttgctgtcatggcttgagtactccaaaagtacttttaagagtgtaccagctgcagtagtagaagggggatataatcttaccctacgctggccaggatgagtacttgggtttctgaggtgatgggtggggctattgagctgccaagagagtatctcttttatcttcaactactagggcaggtagagaaaaaccatcagtttcggggagggtaggtgggtctgagctcagactctccttgggcagggcctactgcggccactgtgggggataagggtgtggttctcaggccaatggagttatgttcccaaggaaattatggctgcctctgctgcatcatacaggtctccagggaagtgggggaaagccggcagtgacaggcctcacccagctcccatgcagccagcaaggccaggctcactccagctgtgttccaccaatagcaccaagtttgtatccaagcagctggcaagcaggctttctaacatttttaacaaaaccatggtgagggtgaaagtagttgattggttttattttttattttgtttttcttttaatgaccttaattggaaaagtaaaaaatttggcaatcctaattcagctgccaaaatttcttagaaaattttactgtagcatataatccaaaagaatggggaactttkgtttagaaagcagaaawcccttgttttgccaactgggacattaggagcaatygcagtgccttttattcatgagtattgtgtatgcagastatacaggaagcaaggtcttaaggaaaaaaagaattctagcctgcttggttattgcttatttcaaaatgcaagcacacaatttaaaatccggtcacacctccttttgctgagctacaagcctgctattacaagtgtttgtaaagtgcctgttagcagttaataagtaaaggtgttggcttatattctgagggtatcaaggtgctcagacagcctaatttgcctattataggatgaaatttgatccctytcttgatgttcagatttggggagccatattccaaaactcttggtactttcctccattgcgtaaagacacaattctaagaacatttgtgaaatgtraaagacagrgtccaagaccctgtaagcatggcctacacgttgcctctgcggtaatggctgcggtggaagtgctgggtcttggaattactccactattcctattgacaagcaaattctggagcacagccagagtggaaatraaggatgagttactatattgaaacaggaaatagaatttaagaaaataggtacaaaattcagatttttctctctggaggaagatgtttcygaaaagaaaataattagcctttggtgaggttggaatgtaaggaatgaaaagtttgcatgaggaaggtgaaaaggcatgcttggagggagcacagaaaagagcagacctatggatattccttggggtatagacatattgacagttcctatacagcctattgccataggtgtctataaaacattaagctctgatatgtggaaagaccagatttagaaaggcctcagctattcactcatgccttcctgagttcagtaaaacacatggagaaataacaatcttaaaaaaaattgttcatttattttctttttgtgcattcagtgtatgataattatagacacatcatttatgaatgacaaaactattctctgattatctgggttaaagccttggaataagttatcgtgtttacctgtgtttccttcatgatacaaactaaggactaaattgttattcaaaatgtcaatygtcattccagaagaggctttgaaaaaattataatctagatagatccaccagacagataccagccaggacttttcttatgaagcatacaaaatatttaatggtgtctgtgcctagaaytggattcaagtcagataataaggcaaattcagagaaaatgattagaatctgaaagggcccagaaagacaaatctaacctcttttccagattcttaaatcataattttttatgactcaaaaaaagctctaatgatcatataatatttttttgtggattgtgtttctgagtttattattattttgaagttactgagtctgagaccctaaaaagcccaaatccagctctgctaatcatcctactgcattgtgggtttcccaagaaaatcatgtaccatggcagacagtgaaaaaggatggacagtgttacattattgatagctgtgaaaatgcttcaaagctctgataaaaaggttgggttgattcacaaggtttactgagacctaaattattcttcttacctgccctgtctctctttctctactctccatctaaatcttgactcccatgttccaaaacatgaccctgcaggacaggaggaataaccaggccccaaaagggacccaagtctactcacccatctgtgggcatggagtcagaaaagagagaggttagcagtctccccaagtggcctggctgcctacatctgtttatcacagagactggaagacagagtaygggaaagaggctggagcttttcaggatacaatgatcttgacccctagttccctccatgtcaatgttttgatcagtcagataagcatcttctcttctcctgtaaaggaaccaagaggacagtgaacagagatgaaagccttctgatatagggatgtatttctgaagtgcatgtttctgcctctataataataatatctgccatgtatcaagtatgtagtatgtgctacatgctgttcagagggctgtatgtgtgttacctcatttcatcttcacaggaacctgtagtgttggcattgttatatactcaagttacagattaaaaaaaacaacacaagctcagaaaggtcaagtttcacctccttcagctatctacccagtgtttaaatacccgctgtgatggatagtcacattggctactgttggcttataaaaatagaaaattcactttcaccactactcccaccctagatagcttaattctactattggtaattctgatcatgattaatttccccctgctattaaaaatgttgactccctatagcctattacactgactactatttgtatcttctataatggtggttctcaaccagggtgattttacccctagtagacatttgacaatgtctggagacatttttggttgccacacttgggagtcggggtgctactggcatctcatgggtagaggccagaatgctgctaaccaccctacaatgcacaggacagttccctgcaacaaagccttatccagcctaaaatgcgaatagttctaagattgggaaatcctgttctgcagccacacaagacaaattggattacattctgcattagcccttagatgtctcaagaaaacaataatgatacatctaacacctccaccatatatatccccccatccataccacactgactctccagtcttcctatgcttatctgtttaaaattccattttaaaaaaaggctcagaagactaagtgaactacccaagtgaaaaacaaagccagccctagatctgagattacttagctccaatttcaattatcttctaattatatcatgtctaatctttcaatctattcactgggaataaaagtgaataatatagacaatatctctattctcacaaagtttatactccagtaaacattaacttaacattttccctacccttgtatgaattatcttctccactgtcatttgagttgctcatatcaacttttaaagccaataaaaaaattcccatagtcagggccctcaaaggaaagcataactactttcatggcaaatgaaggtctgtgcatatagatcaatagaacagaagagtccraaagtgaacccatacaaatgattttgacaaaggtaccacagcagttcaatgggaaaaggataatctttttgataaataatgttgaaacaattgaatagtcatatgtaaaaagattaatcttgaaccctatttcataccataaacaaaaattaaatcaaaayggatcataaacctgaatgcaagatctaaaattacaaaatgtattttaagaaagaaaaaaaagttagtgaccttgagctcagtgaagattcctttaaaacaacaagaaagcgtgaactgtttaaaaaaatcaataatttgaatttcataaaatcaaaactttgcaattaaaaaagacttacaaaaataaagcaagctatatactaggaaaaaatattcgcgtgacatgtatttaacaaaagacaatatgtctaaaatatgtaaagaactcttataacttattaagacaacscattaaaaaatagggaagaatgatgtgattattatgcagtgcatgcctgtatcaaaacatcctagataccccataaatatatatacctactatgtacccacaaccattaaaaattttaaaaagagatttgmacagacacatcaaaaaaattacggatggcaaataaacacatgaaaagcgcaacattgttagtctataaggaaatgaaaattggaaccacaatgaaatatcactacaacccactagaatgactaaaaattaaaaacactataccaagtattgacaaggatgtggagccactggaatgctcatacactgctgctgggaatgcaaaatggtgaaatcactttgtaaacaatctggccacttcttaaaaagttaaacatatacctactattcaaccaagccattgccctcctaagtatttatccaagagaaaagaaaaacatatcctcacaaagacctatagacaaacgttcagagtagctttatttatacagccaaaaactatcaaaacccaatatcaataagtaactaaacaatttgtggtatatctgtacaataagaaggaaagaattacatatgcaacaatatgaatcaaactcaaaataattaagattcaaaaaaggtagaccttccccatgccaaaaataaaaaaaaaatacataatgcaaataatttatagaacagaaattaaccagtgattgcctggataacaggggtggggagttgtggggacttataaaagggaaaatagaagcttctgggttgatggatatgttcattatcttgattgcaatgataatttcatgaatgtatacatatgtcaaaactcatcagattgttcactttagatgcagtcatgcacctcctaatgacattttggtacatgacagaccacatatatgacagtggttccataaaattataatatatatatatatatatatatatatatatatatattttttttttttttttttttttttttgagacggagtctcgctctgtcgcccaggctggagtgcagtggcgggatgtcggctcactgcaagctccgcctcccgagttcacgccattctcctgcctcagcttcccgcgtagctgggactacaggcgcccgccactatgcccggctaattttttgtatttttagtagagacggggtttcaccgttttagccgggatggtctcgatctcctgacctcgtgatccgcccgcctcggcctcccaaagtgctgggattacaggcgtgagccaccgcgcccggmctataatatatattttacatgtttagattatacaatataatatcatattttacatatttatattatacaatatagcctaggtgtgtaataggctatactatctagatttgtgtgaatgcactctgagatgttcacacgacaaygaaattgtctaatgacactgatattgtttggatttgtgtcctgcccaaatctcatgccgaattggaggggcctggtggaaggtgattggatcatggggcggatatttcccttgctgttcttgtaaaagtgagtgagttctcaggagatctgatcctttaaaagtgtgtggcacctctcccttcrctgtctcttctgccaccatgtgaagaaggtgcttgcttccccttcaccttctgcyatgattgtaagtttcttgaggcctcccagtcatgcttcctgttaagcctgcagaactgtgagtcaattaaacctctttgcttcataaattacccagtctcaggtagttctttatagcaatatgaaaacagactaatacagatatagcagtgtgaaaatggactattacagcatttctcagaatgtattccctttgctgggtgaagcatgactatatgtgtagtgtattataccttaaatatacctcaataaaacygtagaaaaatgaaataaataaaaggtgacacattggtgatctttggctgcctttttcccatttgaagggctgtggcatctgtgtctatcctgtagtgctaactacagtggccacatgagtgccttcttttagtgccagcccctgagacctccaaagccctgtcatcactaggagggttctgctggtatagtcatttggtgattagcctgcccatccacaaagaactaacaaggcaataattgcttagatattgcacaytggtgacattggtggccttgtcttgggtaatcttcatcattaagtatggattgagttacaccaatcattttagagtcaaaggcatagcttggaggtcacctgagtcccagtctgccaaatgacagtgtctgagcacatctttcatttccacagacccttgccatacctcatccttgagtctcatttcacatctttatttatacccctgatttcatgtcctgaaagcttatttgttttgacttttcagtgtctctttcctgacccatgatcagtgaaatcctgagccacataaagaccacaattcaccaagacagatttatttcccagaaagtctcttcttgagtataggttaagcatgggtttgagagttaagaatttatatggacagtgtttgggaagatgacaacgatgtttcttgacagatttttattatattttaacaacagctttctctatgtctgtatatattaaatttaagaaaacggtataatttatattatacctgagaggctgcctgctatagtagaaattaccacaaactttatactcaaatctggactcaaagcccatttgtgtagtttccagctatatgaagtttagcttgggcaagtttcttttgggaaactcagttttctcttttgtaatataggatacttgttgtaagggtttaataggctattttctttgaagaaccttggacaataagaagtcatagtaaagtggttcaaatcatgggatcagaagccagacagagtttcagtcttgacctcatcactgattttgtaacactctgtgcctcagttttcttgtctacaaaataaggataacagcatccagcttctaagggtagtatatgggtaaattagttaatgcatgtaaaacatttacaacagtaccaggaaaaagatggggactcaataaatgttagctaccatcattattattgttgcagttatttgttataatgtctgccacataatagctgttgggaaaatagaaggcattgttcatttaaaaccctctcttgttttaaacaacttctccctcctgcagccccttaagaatttccaaggaaccccaatattcttcagatcacagtaggaatgacacattctacatgtgtgttgctcagcaaagcaaatagagaataataactartgtgagattgtaattatgtatatcagtgatgttgctttgtaaatcaaagctaattgattctgagtacttgctacttctttaaccctcctgccagctcaggagcaagcatgcaattttccacgtaaacagcaagggtgcttatagaaaaggtattcaaaacgagcagagtgccatctacactagagcaacatcgaggctagggatttaaacttatcatactgagttscacccatggtatgtatgtatcttagaaggaggaacgacgtttcctcactgtaaacttagataagcacggcttcaccctctggcagccatcctttgacttttccttcagaaaatggtccaaactttttgaatcaatgattctgtcttaaccatcccctggcacactcctaaatctaatgggttcagtaatttaattggctgttatatgaatcagtattttcatttttctaaatgcctgattttcaaatttatgtttactcacactaaatttggcatgcaaatgtaattcttaaagcagaaagtaagaggaactgatgggtgtaggttaaaaaatgaagctagtaaagtttggctatccaaccaaaccccacacaccccatgatccctacagctgtccccgaagtatttcttagaaaccccaaatgttctttgactaacactttaaaaacttcttccctaaagttactttcttcactgaagcctctgtattgttgtatttgcatatctcatgaaaagcccacatccccgcgttgacttcactggtttgtgctttgatgcatttcatcatgttgaatttaagctgtctactttccaaagtgaaaaatccaaatttttcagtacttcaaaaaatccttctttctacccaacgatccatttctctattcatttaatgattaagaaaaaaagaacgaaattttcaagattctttaacccaaaaagataaaatggtgtctgtctgtagaattagattcgaagtcagataataaggcaaactcagagaaaataaggagagcttgaaaggaccctgaaaggcaaatctttgagagggagtccttgtatgctaagtggaatagtcattggattacaaatttgcagacctaggtcctcattaagcctgtcacaagctgcttctgtaacctttcacaggtcagttagcctytctggactttagggtaatccactatgctcacctcatagcattgatgaccccagtgagaagctacaaagggaaatggaaagattctacaaatggaagaaatcatatagtttttgtttttcctgaaaaaaaaaaaaaaaaaaaaagtagggggacttgccccctggagtttgaattggctgtggtttatctttattttcttgcatgcacaaatgcctttttatgtgaagatccttttttctttaagaattggaattgtggttgccctacttagagtcaaaaatgcctatgagcagccgcagccgtctttaactcctacacatatagccaattagggggatgtacgctcatcctgggccttagagaatcttcttctgatccttacagttagaacttcatgttcagagagctgcttagttattatatctaatgacctagttcagccaggacaaaaatgtgaaayatactttttctttctcctgtcccccaccacaaacaygcacacatccatgtgcatgatgtacattccttaagtacactgtgcacacacacatttcttttctccagaccctttgtgtcaaacattttacaattcctcctgccaagctttcatgaagttccagagtggacaaggaaatggccccagtgacacacatcagttctgatggatcattctgaccagcagccaagagtctccggaagagcatgaaagcactaggtcaccgagaaccagtcctttgggtgattaggtattttgcagacagtaggataaatcctcatcttttcctagttataggaagagatatgctttcccccaacagagaaagtgaaaggactagcccgctatcagtttccatggcaactcagatccactacctgcttacttcatcctgtcactgtggaagacttgagggaaaaacaacattaagcttctctctgttttttgtcaaatattttgaagggacatttcatagcatgagtctgaaacacctttttaggagtgaaaaggagaacatgagagagagaaaaagggggagcaatgagcctggggatgctggggacatatttgaggggaagagactgtggctgatgtggtcagtgccaataaaacagagagaggaggaaaggaaagcaataaatatgtattgagtgtccacttcaggcctggtgctgtgcttaataatgcacatgctgtggcctctcagagccctccgtctggaagagaaaggcaggtaaacaggctatgactgcatgagcagagctgccaggacatctgcacagggcacactgcaggcaggggcagaaggcactgacactggtgtttggagggatgggtggaaggcagatttctcttaggaaatgtctatgctagaatctaaagaaagtgtaggggagagcaggtgaaaaagtcctggggcatttctggttgagagagtgaaccatgcagaggccctgagaagtgagacacctcagcttggaagacttctggaagttccttccggctggagtggagcttgagagggcttagggcaaaaaatgagtgtggctggagaagttagcaggttctgaattaygacrtcacttattataagtcatgtttaaggggctgcaatttatctggaccgtaataaggagccattaaagcatgtgaagcaggtttgtgaaaacatcatacctgcagcagagtggaggatggttctgtagccaaacagtgatggtggagggaaagaggggacattctaaagtgaaacagtgtgggtcatggatgagacaagaatggcagcagtggggattaagcaatgtgtatgggttctggaaattttatgacttagaacmaacaatagttattatgggtgaaagagagaagtgaaaaatgaagtccatgttgctggatgactgagtgaacaatagtgccactcactaaacaggagtcagtgatggaggagcgggctggggctatttgcttgattaccaagaagccaggttgggccaggttggtcaggccaggttaagcctttagaatagcccttgtcaagcttctgtgtgagcttgtgtatgggcatgtccagagtctgaaacaggtgtcatggactactatgagaagatgacatgtttagcttaggacatggcatgagtgattctattatagaatgagatttcatgtagaccccaatatggggtacgtaagagcaaccacaacaaaacagttcagaacatctttttattctccatctttaatcaaaacctgcataccttctacacctttcattactgctacctgcccatgaaagtttggaggtgagccatacccgtaaaagaaggaggaaatttaatttcaccgttggtaatcgcaccaggaacttagctgttgtggagttcaacattctcattcgggctcagagaaatttacagcaagaatgctaaaggtggcacatggtagagtgccatgaagatagggtgtggcctatatgagtagttcctggtggtggccgaccagctggcaaaaggatccctcctgtgatccacacacatgcttacttacccctgttctttcttccaggaagtccagtgttaaactcttcatcatcttctagtggtccacagcttttcttcaaaggctgaactcatttttacatacagtcacatgagatcttggtttctgccattttaaatgccaggtatgagacccagccccacaactaggtgatgtgttcatcttaagcaagttgcttaaattctcattttccttctatgtattggagggatgatagtgacagtcgtgagccccaccccaccaggtggcaatgagggataaataagacaaggcctgagaaggaggggtggaaactggaacaggtgttgggtttcctatcacagtatgaggagggcagctgggttgtggaaagaagaggcatgaaccccccagctccttcttcctgtggccctgccatgcgtgtctagctctctctgggaagcatttgctcagagtaatcttgaaccatctgtaggagggtaacaagttctgagaagatagaattccttatgtgtaacagagctgtcactcccaggcatttcttctgccacatgaatgagacagtgaatgaatctctccctgcaccctcactgtgtgtcaactgtctaaggtataactttgagcacagttcccaaatatagtactttatgttctctccggtaatactaataactcacttctggagtcgcagaaagaacwtggatttggattcaggctacctcaatgcacctctgacatttactaggttgtggtgttggataaagcatttaacttctgagggtgtctatttccttgtctgtacaaaagagatcattcctcccaaacattactatgaatattagaggtcatttatacggggggccaagtgcagggcctagcccagagtaggcactcaagcagtagctacattattttattcctaataatttataataataaaaaataagatgttatgctctccccagatgcttagcccaccctccctcaaacttgcatgaattactatggctgcataataatttccctcagtcctgaaggaagcatctaaattagtagttatgaaaccaattaacatcacagaggattggaaaaaaatcctgcctgtgactctagccttgtgactactcagaaatctcagccagcatcacttcagctggcatctggaagttactcctgcaccttgaagcacccctgcaggagccaggtctactgagagtgggcagccctctctgcaggccgagagcaggaggcaggagaactagagagagatgtctagctgggcctgtgctccccagcactcttttgtacccagtggctgtgtgaagggtggatgaagcgtatttggttttaattgggaaatgctatcaattgtcctgggctcatttaaaaatccattagtatcaggaagtggatagattaagcaatgaggaagggaaaagaaaaaagctgtcagcaccttgctttgtagggagcataccgcctgtctaagcttcactagcaagggctgtgctgaatgttaagaagcctgttaaagtcagtttcaagatgctggggagggagaggaggtgtctgggccaattcacacgaagtcctgggcaagcttattgttctcgcagcttccaaaagcggtactgcagtaatctacaccgcatgtttcagattcctgcagctgtttctggaagcctggcaactgtgccacccagctgtaagccacatcaacacctgcaaatagcgaaacccctctgcgctccccsccacaaccccggccgctttttttttttttttttttttctctctcaatgctcagctggacccagatacctcttcatcctgggagccatcagtcyggctaagggtctatggtggacttgaggcaaacagggagaaggatgacagaaatgtgccagaagatgaattagaagagaaagcaaagggaggacaaagataaaagcaagctatgagaacaaaaaatgaaagacagctatgacagcgctgtgtattagcttcctagggcctctgtaacaaagtaccacaaaccagatggcttaaaacagcagacatgtactcttacagttttggaggctagaaatctgaaatcaaggtgttggcaggaccatgccccctctgaagcctctaagtggggatccttccatgcttcttccagcttctggtagccttaggtgttccttggcttgtggtagcctctctccaatctatcctctgtcttcccctggccacccttctgctgtgtctgtgtcttctaataaggacatattattttagattagagtctacctaatccagtaagacatcattttaatttgactacatctgcaaagtccctatttctgaataaggtcacattcataaatattgaggattgcgacctcaacatattttttggtgggacaggattcaacccacgccaggctgtttagaggactgctatctggttaattcagtacatcactgtagaagrccctgggaagcttgaaaaagtactagkaaggaatccagggtcacaaactgaaatgcctgcagaggccaggcaggtaacataataggttctagaataagaaaatggtgactgtcctttagcctggaatcattgggacaacaatgaactggagtacatgccctggataagagcaaaaaatactcagccccagctgttgtcaccttgtaggactgaggctcagggatgccagatcaaatgagaagccaagaatccagatttctatgtgaaatgtctcagttttgtttaaaacctaggcagctatttttttccccaaatatggtgcacaacaaactaagaccatctgcaaataaggcagagccatgggcagtcaatttgccaccactgctataaagccattggttcaaatcccagtcttgccacttgctgtgtgacctcgggcaatttacctcccatctctgggccacaatttccttttgaggaatgagatggtcttaatcatccaatagagtatggtaataaatggtagtgaatattcagaggtataggatgccaggcccacactaatatgcttacatattagtttaagcaacaaaacttacacgttggaaaattgaaagaccaggcacagtggctcatacctgtaatcccagcattttgggaggctgaggcgggtggatcatttaaggtcaggagtgcgagaccagcctggccaacacggtgaaatccagtctctactaaaaataccaaaattagctgggcgtggtggcaggtgcctgtaatcccagctacccgggaggctgaggtatgagaatcrcttgaacctgggaggcagagattgcagtgagccaagatcacaccactatactccagcctgggcaatagagcaagactcagtctcaaaaaaaaaaaaggaaagaaagaaaattaagagacctcagccacttgtcctgaacattatgtaagtggatcaattcaaagccactggaaagtgcctgccccagcctaacgctgaataattctcctcatatatmacccccaccagggctccactctgagtgaggctgtgcagcatgtggttaaaagcatggcttctgtatgcagggatgtgagagagatagcatctagtgggtaagaaagacagcagtagagtggagacaaaaatcctggaatcctggcttgaatgttactgacaacatcagctaatcaataatgcatattctacatgtgaggtactgtcctaagagctttcatgaattattcacaattagtcctcattccaatactggaaggtagatataattacccttgtttcattaacaaggatacagagaagagctggattctagagttttaagtaaaatctcccaattcatttaaattatggcagtggaatcaagtatttttcaaaacactgtgatgtctaaactaagtccatgtgcaaaytgggcccagcccatgggcagctatttcacaacctttggtcatgagctgtgggttccagaccaagctttgccagttttctgtgtgaacctgggtgagtaacatctactctctgaaccatggttgagatattccatagcttgccaaggtcacagagcttgtatgtgtcaaagcccagcatctgaacccaggcagtccagggtcactaagtttattggtggcatagtcttctataagtgtttctgatgcttttctgagacctttctatcaatcargctacagatccagataggacacatgatgctgactcacctgcaatggctgatattcttaacaarttttaatgaaggacagtgaggatgaatgcaaatgcctggaggattgcatagatttctgtaaatatgaaaggtaaagaagagataggayggtccctcctgaatactgcatcagttggcctaaaattgcatcatgragttttgttttcctcagtcatgtgacaattttgattcatgccttaaaataagaggaatctggctttaatactgaatgatatttagtcttaaaaactccatatgaaaataaagctgcccagtggtttttcatatttatttttagcagaaaacctttttaaaaaaaagtgaaatcctacatagaatgccagcatagaaaatagaatgggctggtgttcatcatgttttactaaggcataacaataatgacaatggtaataatagcagcagcaaatccttgccttgggccagccactacttattctgagaccttacctgtggtaactcatctaagccttacaacaaccctttgaggaaactgaggcagagtgatgttaagtaatttgttcagggctacagagctcagtgtgggagtcaggcaggctgcccccagggcctgcaatcttccctgccctgctgctcagctcctcaccctggtacaccacaggggtgcccacatgagaaacagctgattccaaatgggagctgacagcagaattcgtgtctcacagcctgtaatttgtagtcaactttgaaatcgtcgtttgcatttactatctacggagacttaacatatgtaaattgtctgtctcaatagacagttacaaagacctgtcattgtacttcagtctcagctaatctgtcattgaaatgcttcatagggtctttcaaatagaaattcatgtctgcctcaaagcctaaattataactgagaatatcccaagtgttactctacaaatttggtgaaaacctgtccagttgttagttgtggttaggaacaaacagacccaaattttcttgtatttgtatagacaaaagtaaagcctcattgactgagggagatgggaatctggggcccgctgcctgcaatcttcctctcagcaacccatgaggcaactccagagaaccctgggctctgggaactcagtcagagagccacagtccccagccagatagaaacaaccttgtctgctgtctccgggaaagggagagagttgttccaacctggggtctgggagaaatgacagcattcagaagtagggtcggcttaaggaagtatggagatgcaagggacacagcaatcctgggcctctgagcctcaggccagagggtgtttccagcaccttctgagaatttggtaatggctcatctcagatttgcaaaggcactgctggtacctggtttgtctggaaccaggcataggtatttaattcgtatgatgaggctgaggctgacagtgtaaataataaattaaacctctcttgagctttgttttttcaatactycactgataaaatatgacttttaaataaaatttggarcttaaataccaagcttctagagagttgaactagaacagatttctcaatcttggtattattaacattttggactggttaattctttgttgtgggagcttgccctgggtattataggaygattagaagcattgctggcttctgcccactacaggccactagcgtgctctccctcccctactttcgacaatcaaaactgtctctggacattgccaaatatcccctgaggtgaaggggacaaaataaatcccagctgagaattttgaatttgattatttcagaggtaatatttagctatagtcttataatcccttatagtcaaagataactttgaaattaaaagtttaactcaatgtatttttgtactgctaagcatatcctttgtctagacgccctggttcatagattgagaccaagatcatagtggtttgttgtcattccacttgctcttggccacttgacctcaagtcagttgctaaaaaaaaattagcttaataatcctgcattgattgacctctctaacagtctcctattgcctccaactcccttctttcgtcagatttttcttcccacaattataaaactggaagaaarataaatgtccagtgtcttggctgagacagtgtagctcacccagacaggttttctcttctcaagaggcatgatttattttttactttatatttttaaattgtcgttttcctgtcaacttgctccaataattcctgcttaatttccgaagggcttaagatacacaccctgtgtaagcatgtgggttaagagttgaaactgcataatcagaccacagcctatatttgaatcctggctcatccatccatgaactagtttcaggattgtgggcaagttcctgaaactctctgcttcagttttattacttacraaatggggcagcgataatgccagtcccatagggttgtggtgaagatttaataaaatactgtgtataaagtgtttagtaaagtactatgcatatagtaagcattaaatacacactattacctctatcatctttgcgattataatgatttttaattatcacttcattccctttcctcctatttctgctgaaagtatctggaggtaacrccttcatgcagtcaagggattgccttaggaacttttgttgaaataaataatttcaaaaagcaattaaaacttatttcatcatacctttcaatcactctaaggtcaccagccaaaatgatcttagaactcatccagaaccagaaactaggaagtcccaaaaaatccccaaatcctccccccaaattccctaaacaactcttcccttcttttctttccttgtgcacctacatagggtctcccctgctctattcagctttccttttccagaagtagacactgccctcatctgaagtggctgcacttgagttcagaatgacaggggagaaaagaacgtgtttctttgacaatacctatttgctcagcaagtgaaaagcaaagacctgtatggaagaggtaaatcttaggtatagccaaaaatagctattgyctctttatcaccaaccagagtgaactccttgctgcctatgtgcccagtatgaggataaaagccctggtactgaggaagggttcagaggacttgctagcctttttttttttcaagtggcaaaaatttaagtttttattatggactcctgtgtcttctgtgcagacaaccagcagtgaaggatgtgagtaacagcattaggggggatgtcattagcatgcaatatagcactatgtctacacctgtgcacaggcttggatctgccatttactaaccatgagaaaaagattgtcatttgtcacctcacatatttcaagatactctcctatccattagcacagatggtcccatgctagctagcccttgcagtaccagaagtagatatcatttaacccaatagactaagagtcagagaggttgtcagttgctcaaaattacaaatcagttcattatagatctgagagtgacaactcaagcaagttatttgacctgttggatcctcagttttccatagctgtatttcttcctcatcgggtttctaatgattcagtatagaaataatgtttgcaaaacatgtagcccaaagtctggcacttactaagtgctccataaatatttctgaagatagtgattatttggaggatgataatgatgatatatgcagaacagtatatgaaaagaccctgcacagcaattagacctgacaagtcttagtctccagatctgtccctaattattaagttatcttgaattactgtctcaaattctgcagcagaattttctrctgggctcatatggagttaatatcatctgcctctaattgcttataaagacactaagaggctcaactgggtaaaaaggacctttgaaaaatgtaacgtacaaaacagatttacctaataaatgattttctcattctttgcatgccattgttgttgctgttacatttcatcctggcaatggtagttgacaggctgtttaccctataagctcttgtagcccattcctagaaaagaaggaactgcttgaaaccatcactgaaggcaactcaaggcagagtcaagattaggacgcaagtcactgaccgccagtctagattatttctcactcccagaagggaagaactcctacagagactgatcccatcctccttttggacttcatagagagactagatatattgactaatggcattaacaaaatgagaggcatcagaggattctgtgtagccattctgtttgctaactttactgaagcatttcttcagaactatttgtctttccttctttttctagcacttcagggtaaaagagtgttcagaagctgacagccagtgatgtgcttactctatgcacagttcataaagcatgactgcttccaggagagctgtttgtacaagcctgggagaggactcagtctactaacagagacagcagagattgcttgcagaataaatatgcaacttattaaagattattcttgtatactgaatagctccctgatggaggctgaagcaaggggagtaaggattggggaggccatttctcttccatgaggttacaaagtcccattgagatgggagccaagttaattagagagctgtcaagggatagcgtatcttccaaagcagattgacaataggttggggatggaggtcagtcaaagatccaaagaattccgccactgctactgtttgcaatgcccaagtgaagaaacataactagtgcaggaactcttgatatttcagggcttcttgtactttgcaatcgctgaagaaacctgaggaaaggtggtgccaatgtaccattacctaattcagcatttgctttgggttgagaccacaggccattgctgatctgattatagaaaacaagaaaaaaatgaatctagtactgggattgtttagtcctrgaaataaaagacgagatgtgaacccaatagcccttcaggtatttgaagaactctcaggggaaaggtgataatatttcaacatggctcctcagtggagagccagggccrataagcagaggttatagcaagctaaccccacatttggagagttgacaatttcagtggtccaaaatggaatggaatgctttgtgaggtagtaagttccctgctagaggtctctaagcacaaaatgctttacaaactgttctgtgagttctcctgaagttcaatgaagttatagtatatgcaaaaattagctttgacagtggaccctaaatgaaaattattgttggtcaaaattaattttgaaaatcctttaaattatctattaaatacaatatatacatgattttatttttcacaaccccagatagttaaaactggattgcctctgggggcaatgctgttaaaagtggatatcctacctgtatatatgttcccactttagcatttattaatgggtcttgtctgcaacagttattactatggtgactatggtgtttgcttagtgatgatttccattagttccccttcttcctcacttatttattcagtatttatttttttaaaaaggaaaagaatgttgggcacaatggcctgtgcctgtagacccagctacttagaagactgaggcagtaggatcacctgagcccaggagctgaaatctagcctgggcaacatagcctgggcaagactctgtctctaaaaataaaataataaaatacaattttaaaaaacaaaaacaaaaaacaggaaatgaatataaaatgtttatggatataaatgcttatggatataaaatgaatatccataaacaccagaatccctttcagtggggctagattcttggggattgaaggaatcatagccattcatatctctcacctatgttccctccagggcacggtctctgtgagtggatggaatggcaggattgttttcatgttgttagtgcacggaccttgcacatttttattacatttgttctttagtaattttatggagttttaatgagttatttcaattttatttttcaattgcccattgctcatatatagaaatgcaattgacttttatatactgactttgtattctgcaacctttttatctcacttattctatcttttaggattttctagcatatgttatcatgttgtatgcaagtaaagataattttacctcttttaattctatatgactattgtctgtttgtctgccttattgcactgcctggctaccctaatctaatgttgaataaaaattccgagagtagacatccttgccttgttcctgaccttaaagaaaaacatccagcctctcaccatcgaatatagatataaagttctgtgtagatatccttatcgggttgtggaaaatcccatccattcttagtttgctgaagattttaccataaatggaagttggatttcatagaatattttttctgcgtccactgaaatgatcacatggagtttctcctttgcgttattaatatgatgagttaaattcattgatttttgtatattaaatccaaccttgatttcctggaatacatcctactagatttgatttgccaatattttgttaagaattcttaacctacattcataaggtacattgctacagagtttccttttcctgtgatgtgtttgtctggtaatactaggcttataacattatttgaaaaggattcccttctcttttatttcctaaaggagtttatgttaaattcatcttattttaccttaaatgttacatgaaattcttaccagtgaagccatctatgtgcctggttcttctttgaaagttctctgttttcaattcaaatttttaattgacaaaggattatttgggatttttgttgttgtttcttcttcagtctgttttgatcatttatatttttcaaaggatttgttcattttcagttgtcaaatttattgcataaagttgttcataatgttcctttattatcctttcatgattgtagaatagatagtgcttggcgatatcagtattttatttcttctacctttttgagaaattaaatagtggcgtatcaattttaaaacaagattttgattttattgatcattttctgttttatctccatttcttatgcctcaatttttaaacttatatttattgtctttttccttttaatatgttgggtgtttaaatttgatgtttttctaattcataagagggaaacctagatccttgagttttcacacctttttctatttccaggataagcataaaagctataattatttctcaaacactcatttagctgaatctcacaaattttgatgtttattttaattatcattcacttcaaaatgttttttcctatttcttctttcatccaaaattatttagaagtagattgtttaattttcaaatacttaagactttcatggataccttattgctattaatttttaacctaattctatgttgtcagaaagcatactctgcatgatttcagrctttttagatttattgatttttttgtcctaacatatcctgataagcatgtatccttgaaaaaactgtgcctgctggagttgttaggttatatgtctacaaatgtcaataagataaaggttgatagtaacgttcaaatcttctacatctttactaattttttgtctatttctaccaattgctgaaaggtattaaatatccaactataattctgggattgtctttctccccattaattttttaattgtttgctttacatatttttaaggtctcttattggatacatatacatttacgattgttatgtcttcctaatgattgatccttttaatattataaaatgcctcttcttttttctcatatttctcgtatagccaacctacatctttggttaattcctagatatttcattttatttgtggctattataaataggattttttatttctttttcagattgttcagttttgtcatatagaaatgctactgatttttttatgttgatttttgtatcctgcaactttactgaatttgtttatcagttctaagagttttttgtggagtctttaggtttttccaaatataagatcatatcttcaaacaaagtaatttagcttcttccattccagtttggatgtcttttattgctttttctggtctgattgctctagctaggacttccaggactgtgttgaataacagtcttgaaagtgagcatccttgtcatgttccagatcttggagaaaaggctttcagtttttccctactcaatatgacaccagttgagggtctgtcatatatggcttttattatgttgaggtatgttccctctatacacaatttttagggtttttgtcataaatggatgttgaattttgtcaaatacttttcagcaccaaataacatgattatgtcatttttatccttcattctgttggtatgatgtatcacatcgattgatttgtgttgttgacccatccttgcatcccagggataaatcccacttggtcatgatgtattatctttttaatgtattgttgaatttggtttgctggtactttgtcaaggatttttgcatcaatattcatcagagatattggcccgtagtttcttctttcgatatgtctttgtctggtttttgtatcagcataatattggcctcatagaatgagttaggaggtattcccatctctatttgcagaataatgtgagcaggatcggtattagttcttctttaaatgtttggtaaaattcagcagtgaagccatcaggtcccaggcttttctttactagtagacttttttttcttttgagatggggtctcactctgtcacccaggctggagtgcagtggcgcgatctcggctcactgcaacctctgccccccaggttcaagcgattcttctgcctcagcctcccaggtagttgggactacaggcgtacgccaccacgcctggctaatttttgtatttttagtagagacggggtttcaccatattggtcaggctgggcgaactcctgacctcatgatcctcctgccttggcctcccaaagtgctgggattacaggcgtgagccaccatgcctggcctactagtagactttttattatggctttgatcttattacttgttattggtctgttcagattttacatttctttctcgttcagtcttggtaggttgtatgtgtctagaaatttgctcatttcctctagattttcccatttatcatcatacctttgctcatagcagccactaacgatcctttgaatttctgtaacagttgtaatgtctcctttttcatttattattttatttggatcttctctttttttcttggtctggctaaaggtttttccattttgtttaacttttcaaaaaaccaactttttgtttcattgccttttgtattctttctaactcatttatttctgctctgatctttatttcttttcttcgactaattttgggtttggtttgctcttgcttttctagtgctttaagatgcatcattagattgtttacttgaagtttttcctctttataggcacttatagttataaacttccctcttagtaatgcttttgctatatcccataggttttggtatgttgtgtttccattatcatttgtttcaagaattttttttaatttccttaatttctttatttacccactggtcattcaggagcacattgtttaatttccctgtgtttacaaagtttccaaaatttctctttattgatttctagttttattccattgtggtcagacaagatgcttgatattatttcaatttttgcatattttaagacttgttttgtgacctaacatatggtctatccttgagaatgatccatgtgctaaggaaactaatgtatattcagtagttattggatgaaatgttctgtgattatctagtagatccatttggtctataatgcaaattaagtctgattttttttgttgattttctgtctggaagatctgtccaatgctaaaagtgaagtattgaagtctccagatattattgtattggggtctatctctctctttagctctaataatattttctttatatatctgtgtgctccagtgttgggtgcatgtagatttacaattgttatatcctcctgctaaattgacccctttatcattatatagtgaccttcattgtctcttatagtttttgtcttgaaatctattttgtctgacataagtatagatatcttgctcttttttagtttccattggcatgaaacatcttttttcatctctttattttcaatctgtatgtatctttataagtgaagcatgtttcttgtaggcagcagatttttttttttagtccattcaggccctgtatgttttttgattagagattttagtccatttacattcagtgctattcttgataagtaaggacttacccctaccattttgttatttgttttccggtgttttttttttttttaatcttctcttcctactttctttctttcctgtcttcctttagtaaagatgattttctctggtgatattatttagtttcttgcttttcattttttgtgtatccattgtatcttttttaatttgaggttactatgaggcttacaaataccatcttataacctattattttaacctgataacaacactgtttgcataaataaacaagcagctgaactcttctactatattcttacttatttttaattcattaatttttatacattctgacaatttctgctttttaactgaagtgtttacttcctcaatagttaatgtaattttaatatagttacgtcttagtctactattttgttatttactttcaacttgacccttctgtttcaatgtgttcttttgttgtgtttttattgagtagttgttgttcctcttttcctaaaatttttggatcatgttaataatttttaaagttttgttttaatttttatcttgactttttaagctacacttttcacatttttttcagtggttgtactaggttatgaatcttataaattaatataaactcttaacttttaatagtctacttagagtttatatgtaccactttacataaagctttgcaatcatataaatttatttattctcttctatactttgttctattgttacatgtattacatttacttacataaaaacccccagaaggtaatgttttaaataggcacatgtactataaactaattttttaacacacacaaaaagagtctcttttacatttatatagatatttaccacttctagtgctctttattcctttctgggaataaagagtttccatctggtgtcacttctgctatagcctgaagaagaatccttagcatttcttgtagtgcaggtctgatgcactacagtataggtaacaaattccatagttgttttttaatgtaacatatattttgccttcattccttttttttttttttttttttgagatggagtctcactctgtcaccaacctggagtgcagtgacatgatatcggctcactgcaacctccacctcccgggttcaagtgattctcctgcctcagcctcctgaatagctgggactacaggcatgcaccaccggtggtgcccatctaatttttgtatttttagtagagatggggtttcaccatgttgtccaggatggtctygatctcttgacctcatgatcttacctccttggccttcaaaagtgctgggattacaggcatgagccaccgtgcctggccttcattcttaaataattatttttgttgcttatataattctgagttgattttttttctttggctctttaaacatgttgttctaatcatttctggcccttattcaaatcactgttacatatatatatatatgtgtgtgtgtatatatatatatataacgttacatatatgtgttacacatatgtgttacatatatgtgtaatatatgtgtgacatatatgtaacgtatatatgtaacatatgtgacatatatatgtcatttttctctgacccctctcatttgctttttcccttaactttttatggtcattagcacatctatgtgcctatggctatttttatatttattctgcttgtgatttattgaacatcttgaatctgtaatttgtatcttttgtcaaatttgggaagttttgtgtcattatttctttactttttcttagactcctttcatttctttcattctgaaacttcaataacatatattagactattttatattatctaacaggttcctgtggcattgcttattcactctctattcttcacatcatacattggtaacaaaccaactaaaaaggaaatcaagaaagcaatctcatttgcaataactacacaataaaaaagacatagaaattaatttaaccgagcaggtgaaaatctctacaatgaaaactacaaaacacagttgaaagaaatttcagaagatacaaaaacatgaaaggatagtccctgttcatggatcaaaagaagtaatattgttaaaatatccataatacccaaagcaatctacatatttaatacaatacctatcaaaataccaatgatgctcacatctgtaatttaagaactttgggaggctgaggtaggaggatcacatgagcctcaggagttcaaggatgcagtgagttatgattgtgccactgcaccgtagcacgggcaacagagcaagaccctgtctctgaaaacagaacaaaaacaatgacattcttcatagaaatagaaagaaaaatccaaaaattcttatgaaaccacagaaggccccaagtagccaaagaaattctgagcaaaatgaatacagctagaggcatcccactacctgacttcaaaatatactacaaagctatagtaactgaaacagcaggtattgrtataaaaacagccacatagaccaatggaacaaaatagagaacccagaaataaatcagcatatttacaaccaactgacttgacaacgttgccaagaacttacactgggaaaacatagcctcttcaataaatcaagcctggaaaactgcatatccatatgcagaagaatgaaactagactctcatctctcaccatattcaaaaaatctacttaaaacagattaaagacttaaatgtaagacctgaaactataaaactactagaagaaaacataggaaaagcacttcaggacattagtcaaggcaacaattttatggttaagatttcaaaagcacaaccaacaaaagcaaaaatwgataatyttattgctgtatcttcagatttactaactctttcctctgtcatttccattctcctgttaaatctgtccagtgaatttttaaattttggatattttatttggggctccaaggttaatctggttctttttcatttttccccatctcgctgatatttttaatcttttcattcattgtaagtaagcacattatcctttacatcattgaggtatttataatatttcctttaaatttcatgtcattaattccaacatctaggtcacttttttgtattggcctgagttaatggtcttttcctttgagaattggtcacatttttgggggtcttacctgttcaacatcctcgatataatgaaggttaaatatggagatgctggatcctgacattttcctataaagactgtaggattttttattttagcaggcacttaacttgattagaactgaactgtttttgggtgggcagtggctcccatcttagttcaaatatttgtttgtttttagttcatctttgagcctcgtccatgcatagacaattcagggtcaagcaaagatgagggccgacagaacttggagtaacctttctggatcttcccccttctttctatagtgagtatcgtccccagacttagttccctagttattcatatcataaagacagacatttttccaccagtactcgtactcttaaccaactgcactggcacccaggccaaaaccagcaaaaacagagaactcactccatgaaactcccattctccatacaactcccattctccacacaactcactgactacttgaccagattctacaactagatattaggggttcaaattcagaaagccactgcctcatgcccatgaaagactgtcttaatgtaaccttactaccagtcaaactcttgcraagccattaggagcaggtacctgttcacttgccagagagtatcccccatgcagaaccaaattcaccagcagaggattagcctaggtacagcatggctgatcattatgacagaagattgggtcaggaccacatggtagctctgaacttaaacacattagaagcattttaattccccatctttactcacaaacggcaaacaaggctgactcatcttggtagctttcctgggtttaagacttttaatatttaaaatagactgaaaatcataatgagagaaactactgttgaataaaaaagcagtttctacatcttccccatagattctgtaatcaaaactattttcttggttaaatggtttatgtatctaactagagaaaagggggtaggaagacattatgggaaggttaatggggtcttacagagaacccagagaatggctgaaccaggtctcagaaaggacaggggccaggacaactccagcggcctcagcagcagaggctcaaggtccttttcccaagtgttctgccagtaaagtgacttcccaccaactctgggtctggagagaattcaattgtcttatctgatttgaggatgcattaaaatttaaccatgtccacaggggcgggtcatatatggaaacatggtgctgggactggaaaggtgcagttttcagaagaggggtactagctggacagacaccctggagagtgtctagaatatacaagggggccagaggggctactagaagagcagcaggacaacttcaaagaagctactttgtgggcagtgtgcacatgcaaaagaaaaacgctttttgtactcagtcatccagtccaacaacagagaaatattgatttttcccagcatctcattcagccctaagcatatatagcagctgtacttgctgtgtctagtatgcatcgttaacaactcccatcaggtggggtcggggggaagcacattaggaggccaatgaattcctggttgtgtagcctcggacttatgacttaatctttatttgcctcaagttcctcatctgaagaagagaaatatcgttccattcagggtagcaatgaaatgagacagcaggtagcaggtatgaaagttgagaacacagacttgaatctcatcagcaaggcagagccctggtcctgatgcccatggctgtggggccctgcagatgccttaccttctttgagctgcactctccacatctgtagaacaagaataggtaaactcactgtgggctttgtcagcattataygatttatataaatcatcgtgcatagtgcctaacagctagcttaaatctgtggttaaaaactgtttttaagtgatggtgcttggaagaagaatttacagttgcacactgtgggcttttatattattgctgttagcatgaccgttatcatcagtgattcaaggaaccccaggttccaagaaacaagaatgaagcaagtatagcttcatagatatccttccttcttcaaaaatctcttcattgctatcaagtaagattaaaatgccttgacttgacagacaaggctgtccgggctctgattactctcttcagccttacttctcactctctctcctgtttccaccatctccccacctcactctacaacccacctgctcactatgggccattcccccaaacactctttatagttcaaatctctgtgtctttcttctttccattttctcctcttggaaagaccttttgacctatctctacctattgaaattcatgtttcgagtccaataaaacctccttgtaggccgttgctactgccactaccgttgtcacctcctgaattcatttactccttcaatctttgcttgtaccgctactctgatttagttagccttttgttttgtttagtctatttagctgcttccatgactcaattccctaccccattacaagcccctttagggcagaggggcaggcatctgtcataatcatctttgtaatccttgttagctagcgcagcagctgacacaaaggtggaacacagtagtcattggaaaggagaaaagaaagaaaggcagaaggacagaagaaattgtgtcatgaactgccctctgtggagctcagatatgtgctagcaataagcattagtgctatgctctgatcaaccaagtggcacagcccactgagaatacccagaaatggaaaaatacacttctcccttgcattataagcttccagagagtttttaatcattccatgctgtcagattatgaaatcccagaaaatctgaagccctaaggggcctaacaataatgtaattattcagtatcttcatattgcagatgtgcaaactgaggccaagagagatttagcctctgttccccagagttattcagcaaatcagcagcagagctgagacaaggatcagggagctctgtggctgccatgtccagaccctccccttgttagcaacaaaccaccattcccaggccttgcttgattttcattttcctgggcttgacccacatacccaatttcctgctgtcccagcccagtgaagtagtggctcattccaggggcttgttactcaaacaaaaagagatgaaacaacacattctgagagaataaagcagccagcaaaagggttccgtgaaacagtgaaattagagggagcccagtccataagaccaccctacggtctgacaacaattgcatgtcttggggttccccaagaccaaaggtgtgaaaaattcactatcaggactcacagaactcactgaaagctgttattctcatggttaggtcttattacatggaaagggcaccaattaaaatcagccaagagaagagacacattaggcaggagccagggaaggcccaaatgcagagttcccactttcctcttcccatggagccatgggtgtgttatttccctggcatcagtgtgagacaacatacacagtgttgccacccggagaagctcccttgagccatggtatccagagtttgtattggggctctatcacatacgtatagttagataattgaaataagtgactaaagcaaagatctcaatcaatagaggtttgttaagccagcttcagggtgtatcggggaaaaactcaagccacacacatgtctgtggctatttttccaaataggttttcaggcagtttagtatttacacatttccttaaagaggggcaggcatccaagaagaagagacggtaggcagtaaggtgaatggttacattcttgtgagactttagttagtgcccagtaaatctacattttacataagataaggtgaatgtttgaaaagaaaaaaaaaagtaaaggaagaatcaattacatagacttctctgggtaggtagagagctgactgatctcttgtctttcttctacacctgggaagataagcttgtaatgacattatcagtgtgaaaccaaacagatattagttttaggagcaagacttagattgtagacctaaagttacaattggtatgtccttgttcacaagaggccaaaaaataatttacctatgaatgatctgtggaggcagtcacacttggagatgcctgaggccttttacctttcctggtggtctggctaatgcataatgctagtaacagctactcatttggaagagggtgttgcatgactcaggctgtaggtttaaccttccctttggcataaggactttgggatcctgagattttttttaattttcctttatgggttgtatgaccacatagctgatttcagtctccaacacccctggaagttgagctgataccgtgggacccaaagttcccaccctaaaaaaacattgttaaactatttggcaggacccaacacaccaggcaaataaaaatgaaaacaccctcaggaataacattccaagggcttagagatgaccggaagccagggacaaaggccagacctcccttaggcaaggttaacttctttaccacactgaaccctgcatctatattcttcctgaccttctttacctttgttttcacaaagcataccgggaaatgcgtgtgctttggaatcaggcaggcctgtgtaggctgtaccacttatacctgtgtggcctcagccattcacttatgcctgtaagcctcagttttctcctgtggaaaatgatgatagaggtgcctatcccttgtggtgtttgtagggatcggcgttcatgctttcagtgtataatgtccaatataatactaatatgtagcaggtaccgtaaactcagaaaatctaagacaggtctcagttaatctggaaagtttattttgccaaggttgaggacccatccgtgacacagcctcagaaagtcctgatgacatgtgcccaaggtgrtcagggcacagcttggttttatacatttttgggagagctgagacatcaatcaatatatgtaagaagtaccttagttccttccagaaaggtgaggacaattcaaagcaagtcccccaccccacccccgggggcttccaggtcacaggtaggtgagagacaaatggttgcactcttttgagtttctgataagtctttccaaaggaggcaatcagaatatggatctatctctgtgagcagagggatgagtttgttagaatgggaggcagatttgccctgagcagtttccagcttgaaagggcccaagatattttcctttcatagtacccaataaatgagagctcacacttgcagccttctcttcttcatctctcctcctcctcctccccccctactccttcctcctccccttcttcccccacccccttgctctctctgtttcccttttcaactctctatcttctctcaggacaggaagatgtcacttcagtgtgctgtgaataaggaaatgccaaatttaagggaaccagattcttgcagcagtcttgggatatcctgcctcccagagacagcacctgatggcatctgtttaacaaagctagctgtctagggctgggatgaacaggactcacactttgtaatgacttagctccactccaagtctggtgtaaattgaagatgaaaatgtgttttccaaaaatactcaggctgttgctgatgcctgggcctgtttcaccttggttatacaatagtcttgtctgtgcttctcttctgggcctacatggctgggcttgcatgccaggcaactttcctaagaaaaaccccgcacttatccctggtgtgagcaaacaataaactcaccatgcagagaaaaggtctaaagcaccccagagtgacattgaccatgttatgaagcaacgtcttagtgaggccatggaacttgcaccaccctgagttaggctcgcgcgtctctcagtggctttcctgatgcttcctagaattgttctgtggtttgggaaaaggcacaccttccccagactctcattccatgattgagattagccttccatgtttattctctccaaaaatgccttctccaactcccatactactccctgactacatgtccttctctctacagaaytataatcaaaaagaaaaaaacaaaaaaattttggttcagggcctcggtttccagattattaaaaaatctgagtcacagattttgccatttccttcactccatttcttcccaccaatgtagcattcagaataatcaatggcaacaggctagtgcatcttctacctaagaatcccatagtaggccgggcgtggtggctcacgcctgtaatcccagcactttgggaggccaaggcgggcagatcacgaggtcaggagatcgagaccatcctggctaacacggtgaaaccccgtctctactaaaaatacaaaaaatcagccgggtgtgatggcgggcgcctgtagtcccagctacttgcgaggctgaggcaggagaatggcatgaacccgggaggcggagcttgcagtgagccgagatcgcgccactgcactccagccttggcgacagagcaactaaaaaaaaaaaaaaatcccatcgtaagcctgtgatgtatccagaaaattagatctgggtaagacgatgaaacattcatgcactgcccttattttactgcaagaactagagtgaagaaggtagttttccccaagtcacagacattcttagtgagtaaagcagggtaatcagtgaagacagaacttgagtgaactcaaccaaagattttgctttccgtatgttcaggttatttttatgactgccatctcttcaaactgttcttcccctgtaagtatatcctcctttcttcatctattttgcagtcattctttctcctgtttctttcctaaatcagacatcattatcttttttaatcttaaacttttttattaagtcagaggaataggtcttcttccgtaattcattaattcaacagatatttatttagtgtttcctacatacaaggaactattctaggctttctggaaaaagcaatgaacaaaacagacaaaagtccctgttttcatatagtttacatgctagtagtggaaagcaatggcaataagcaaacaaaaaatgtaaatgtatatattacatcagatgataaatgctttgaataaaaaaatgcaaggaaggaggacaaaggctcccagagtggagggaacttacagttttaaataggatggtcaaggaagttctcattaaaaagagcaagaaacagaggaggtgctcaagggaggtttgcaggtatcaagacagaggtaatcacaggtttgaagtctttgagggggcacatgacctgtgtgccctaacaacaactgggaggccattatagctggagcagactgaacaagagagaaggggaacttagaaagaggatcagagaagasaggaggggccagaatgtatagggctgtcagtattaactgcagagtaactaagggatacaaatacaaaggaattatagttagaattatagttatggtactttacttttactccaaacatataggaagccaatggagagttttgagtgcagttgagaaataacttgacatatttttaaggatgtggccaggtacactggccccttcctgtaattccagcactttgggggactgaggtgggatgatcacttgaggcctgtagttcaaagttacagtgagctatgattacatcactgcgtttcagcctgggtgacagagtaagactctgtctctaaaaaaaaaaaaaaaaaaaaaaaggaattatagcttctcaggtaaacttgtgtcatgggggttcatggtacagattatttcattacccatgtactaagcctaatacccattatttttcctgatcctctccctcctcccatcctccaccctccgataggccccagtgtatgttcttcccctctctgtacccttgtgttctcatcatttagttcccacttacaaatgagaacatgcagtgatttggttttctgttcctgtattactttgccaaggataatggctccatccatgtccccgcaaaggacataatattattcttttttgtggctgcacagtattccatggtgtatatgtaccatattttctttatccagtctatcattgatgggcatttaagttgattccatgtcttttctattgcgactcatgctacagtgaacgtacgtgtgcttttttaagcacagactcaggaggcaaaataaaagtgcaatcaggtaggagatatagtggtgacctggatcagggtagtattagtggaggcaacaagaaatagactgttatacattagtgtaaataacatggtatttcttgattaattttatatggctagatacaggaaaagagagcgagagagaatgaaggggagagagagaaataagaatgacacaaaaaattttgaccaacaactgaaaggatgaagttgccatggccatttggggacaaattatgcttactcyctctgcctcaattttctcatctgccaagtgggggaaaataaccaaaatgatatggtgattatgacagataaatgagttaatacaagcaaaatgcttagaattgtgtctggtgcataayagttagctactgttacatcctcctcctcttctccctgtgtattccttcagagarctaaacacagtctgatatgatcttgtttattttttctttatatatctcctccaccaaaatgtaagcttcatgaaggcaatggtctcacctgtcaagttcatgccatatcaccagcttctgcaacagcatttcaaccttagtatatgctcgatgaatatttaatgcatagaagtatgaaaaggtaaaatagtcagcccagattttccaggacatctctcttgacataggcactgttcatctcacacacacatacttgtccatttgtgacttagaaaatgtggtcactgccattaagatgaaccacagataggttagatggttcatgcaggaagatttctgtgtatgctatgccttggcgaaaggaaaattctatctaaacacagccatcagtgaaaggtctgagattccatggacagtaatctcagtatgctctgtatgaagctgaaatcaatgcacctggttgttctgtaattagcagagctgctgccctgcctccactctctgcttccactgtcaaggtgtygctcatctctgggctggctttccatcccargatggtttggcttgctgtgcatggctggagggaagcaggagagggcaaggacccaattagattgaaatggaatcgagtctttggaggccccttgtcagggtgaagagtgttggatgttcccagtgatggcagatgcttctttatttgggctgatctcagaggttagagatcatttgtaaatcagatttgctccatttggtatggcaagtcctgttttctgtgccttattttttttttaatccctgaatctttttccctgtgttttgacatgcttgctgccagcagaaaggctgtttggtctggaatgaatatttcaaattcttgggagcagctaaggtagcaaccaagtccataagggaatggatgatctgttcacgtggtgctaaaacaacccagtgggaagaatataggcagaacacatgacagtacgaatgagtacaaagtgaagcctcaataataatttcccctgattttagatgggagaaggggaaatgagttatattcattatttcgtctttaatttgtggttcttagtctttgtatagatgatattccagggaatgtaatcttcaaagaaataatatcccattctgagtataaacacaaattttaatccaaattatgagatgtttaacccagattaatagactcataagaacccgtgggctatctgaaatgtgtttgtttgcttggatatgtttagttaacagccacttatgacaaatacttcctacgaagcactcgttctaatgttttaaaaatattatttcatggaatcctcacagcccaagaggtatatattattattatccccacacaaagaaggtaattgagatcctgagaggttgagactcacagctagaaagaagcagagctagtatttgcatccaggtagtctggatccagttgtttgcaaaatgctataatggctccaagacaggaccagctttggagttgtttcttaattttgtcttattaagggagggcatattgaaaggaatcaggagcatctcatagaatctaagagccaagagagcagtcagccctgtgtggatagtaatcggggaatataaagtcaaaagaagtctttttagccatctgtyctgtcttttagctcttcttcatgttttctttgtaagactggcctaggaacccactcatcagcttgaatgtggcccatcttagctgaccagcacagtagccccatcctcttagccttttccacctgcctctcacattttcctctcatcagtctcccagtcatctgaaactttaaagataatgatgactggcctaaatgacagagatttaaaagtttaattttcagaagcttcactggaaatcttgaggggcactgcagcagcctgttcagaactctttatgtcacacttcttcctttatgcagtgacacttgtgacaatggcctggggcctaaatgaggcaaaagtgagagcattagccctgatgtggcagtactagatatctagcagaatctattttgtacctcaaaaccttattttctttttgataaaaatcaatattgtaaatcaagtgagcatcatcatgatttcccacggatattcattgttcaggatgtattaacagtccatacggacagagcaccatggtccatgaaccccgaggtgttctgacatcctgttctgtgattcaaaaaaagcaagatgtgtgcacagtctccaacctatgaaggcccagatggcaactttccatgtttaaactgctttttattataaatatttacacacacacacacacatatgcacatacttcatgacaacaccaacttgtatttacaacaggcttacttactgcaaccaactcttatgccaattattcactgagggaattgaaatcagtccagtgtaatcaacaatagtaagaaaaagcaatcggcttagttgtgggagggaataattttttattgcaaacctttgtaagcagcatgcaaattatatgcttctctaccaaagctacagtgctgaccaaggcaacatttctctttcaaaaactaagaacccatgtggtaaaacatccaggaaggaattttcaacatgaggaaaggatggtttgagcttatcaggaagagagggctataaactcaaggaaaagctgcaaatgcagaaaagaagaaaaagaagaatcttccagaaaactgtgctgaaattgttgaaataagaagctagtcatcgcaaagaatattttatatcacacaacaaggatcaagatttcttggccaacgcctgattgaagaagctttcaggcatactgactcataagaaaagttgtaagagagctgactttaattttaattcagtccagaggaccctggagcaaagaaaagtgtttaagaagcttgttaagagacatatttcccaggaaagaaagccagtgttttcattttaaactccatcgcacttagtttttaaagcctctttaaaaagaaagaaaataaattatagcctttacattcagtgtttcatttttgctttctaataaatgttgcaaaagcacatattttggaggttattttccccttcatttattttcatgattagtgttggtatttttacggtatacaaagagttgccataagcataataccaattcataacatcacaccaaggggaaataagggcttatattacattcactacatttgccagcagaaaacaattaggttagcagttgcaattcaagtaaattcagagtagccataaaatcaccaatgccttgggaggagttacaggacatttcagaatctttactgaaggaagaaatgcaacttctttcctgccatttgttgatgctgcaattccatttgtgaaaggaaaaagtctaaccaccataatagctctgttagtttttcttgggatggcagaatcataggcctgagagacctgcatataaatcctgcctgggtcttttataatctgagcttcaggaagctgcttaaccttctgggactgagtttcttcattggaaaatggtaataatcacacttcccttgcaaagtgatggtaagtattagagataatctactcaacagcacctggcacatagaatggacgaaataatggccatattattttacttttcctaatgaggacaataatatttatagtagagttttgagattatgttcaaacaagtcactggctctttacatacggatctcttgaatgtcctatgccattccagtccattgttataaatctctgtttttatttaataactcatttccattcaactcagcaaccattcagcaagcactactatggacacagtgctaggcaaggcaaggcatacaaacacaaatcatgcattggcctttgccctccaggaactactgggttgttgcaaaagtagttgcagttattgccattactttttttgagacggagtctccctctgttgcccaggccagagtgcaacggcgcgatctcggcttactgcaagctctgcctcccgggttcacaccattctcctgcctcagcctcccgagtagctgggactacaggcgcccaccaacacgcctggctaattttttgtatttttagtagagacagggtttcaccatgttagccaggatggtctcgatctcctgacctcgtgatccgcccgtctcagcctcacaaagtgctgggattacaggcgtgagccaccgtgcccggccgccattacttttaatggtaaaaaccccaattacttttgcaccaacctaatacagtttttttatttattggctaattgttccgtcccagtccaaagaactctgacgaacttcaatcctgttgagtttacttattcctttgtttattcatctgtttattcaamatccaagtttgtgctatgtgccgggacagtggcggatcttgaaccagacgtagtccctgttcacgaggagcactctagagggttactagggtttggtttgtccctaccaaaactcatgttgaaatttgatccccagtgtagcagtatgggaggtggggtctgatgaaaggtgtttgggccatggggtcggatccctcttgggtggcttggtgccattcccaaggtagtgagtgagttcttgctatgatgatactggattagttctcacaaaaatggattagttcccatgagagtgggttcttataaagccaggacacccctggggttttgtctctttgtgtgtgtaccctttccctatgtcttcttcaccatgttagcatgcagcacaaaagctctcaccaaaaagcagagctatgcccttgaacttcacagtctataaaactataagctaaataaacttcttttctttataaattacccagtctctgatattctgagaccatggtattgttagagcaacacaaaatggactaagacaaggagaatgcagagtgattaatgttccaggttggaatccatacttgtctgacttcagaactggggcccaaatctgccatgctgtactgagacatttaatgagctttattaaaatccagtcacacaccctgcttcatctcctagtagacttctaggaagggctttctggtatgtacccaaaactagtcacctagtttagatttgggaaagaaatggcactagggacgtcagtgtacgcatccaattcctggccaaagtttctacctcaagtacattgctgctttctgccctgcagaggcaagaccatgaataacaaaatgcttaagcagccctcctatttctttagtttctagaccaaatcctctctctgagcaattagccccttgcttgctttctccttgatctcagcctggctggccctctgtggccccccaactgagatcccaccaagtacagggtaaatccaacctatgttttcattccagattcagcaccccgccttatcccttgtgactagttttgggtacataccagagagcccttcctagaagtctactaggagatggagcagggtgtgtgactggactttaataaagctcattaagtgtctcagtacagcatggcagatttgggccccagttctgaagtcagacaagtatggattccaacctgaaacatgctcccatgaattgtagggttttagggaggatatttaactttactgagccctagtttcctcttctgtaatatgggaataacaatagttttagcgccagggatcttgtgaggattaaataaattcatattggtgaaaggcttagcttagtgtgtgatatttgataagctctcaaccaatatatcaccgttaaagcaggtgctctccaaaactgcttcactttggaacaaactgtcccaagttcactgagggcttgaacttttagcagggaaggcagttctcagggattcagacctttttctacaggaagagagaaaattgagacagaaaaagagaactgaacaacagaagaagagaattggagatatacatacgctccccaaagacacaccaggctttgccctctatccaactaatcaaatttgaacattatatcatttttgttttagattttctttgaaaaaatttagagatatagttgaagtttattgtgtattctcctccaattcctctccttctccaagcattactgttgtcctaaacttggtattatttccacacatgtttttctactatcataagtatatgtaaaattcaaaacaatatagtttcacataaagaatatgtagcattgttttaaaccttatataaatagcatttataactgaactgttagttgcctactcaatattttcttttcttgcttacagaacttgcaatttattctgatcaacaatttgcccagctaaagtactacatctgccccctcttcctgtggctgtaggggsacagcaaaggtcactggtctaacytccttaaagggactccgctaacaggtatatcttttgcgttgcttccccgtttctttccttttcctatgtggaacatgactgaggtggatgtagctccaatagtcctttggttcatgacaccaccttgatgatggaaaccagagctaaggatgatggaacagaaaaaacggggtcccgcaggaccttggtgcctccatatcagccttggactacctacctctagatttgttttacatcataaagaaacctctaccttgtttaagccacttattgttgttgtttttgtagttgttaaatgtggctgaacctaaccctagataatggagactcatatgtatcgtcttcccagtggaactttttgctcaactttacattttgtttcctagcattctgtttgttttatgaggcaagcatagtgttaaagcaccaattctggagtagatgggctggttcacagcccaactctgccaccgacagctatgagacctttaaatacttaaacttccctgcttcttactttcttcatctgtaaaatggggatgctaatagtaccccccatcacagggttgttatgagagttatatgaattaatattgacatgcaaagtgcttatagtagtacttacagcaaaataatagttaacccttaataagacattattatatgctatgtattcatgagatatagtataattttaactgccattagatattctattttataaatatgttacaatttttttattctrctctttgatggacatttgtttccatttttgacatttactgaatgatgacgtaattaatatttctgaagatctccttgtgcacgtgtgcaaattgcttcaaggtatgtatatagatgtgaaaatgctgggtctaagaacatgtgcactttcaacacggcttaataaaactaaattctggccgggtatggtggctcacgcctgtaatcccagcactttgggaggcccaggagagtggatcacgaggtcaggagttcaagaccagcctggccaagatggtgaaaccccatctcaactaaaactacaaaaattagccaggcgtagtggtaggcacctataatcccagctactcaggaggctgagtcagagaattgcttgaacctaggaggcaaaggttgcagtgagccgaaaccacaccactgcactccagcctgggccacagagtgagacactgtctcaaaaataaataaataaataaataaataaataaataaataaataaataaataaagcaagctaaattcttctcaaaatggtcacaaaaatttgtttatgagagtgggaggagccaagatggccgaataggaacagctccggtctacagctcccagcgtgagcgacgcagaagacgggtgatttctgcatttccatctgaggtaccgggttcatctcactagggagtgccagacagtgggcgcaggccagtgtgtgtgcgcaccgtgcgcgagccgaagcagggcgaggcattgcctcacctgggaagcgcaaggggtcagggagttccctttccgagtcaaagaaaggggtgacggacgcacctggaaaatcgggtcactcccacccgaatattgtgcttttcagaccggcttaagaaacggcgcaccacgagactatatcccacacctggctcagagggttctacgcccacggaatctcgctgattgctagcacagcagtctgagatcaaactgcaaggcagcaacgaggctgggggaggggcgcccgccattgcccaggcttgcttaggtaaacaaagcagccgggaacctcgaacttggtggagcccaccacagctcaaggaggcctgcctgcctctgtaggctccacctctgggggcagggcacagacaaacaaaaagacagcagtaacctctgcagacttaagtgtccctgtctgacagatttgaagagagcagtggttctcccagcacgcagctggagatctgagaacgggcagactgcctcctcaagtgggtccctgacccctgacccccgagcagcctaactgggaggcaccccccagcagggccacactgacacctcacacggcagggtattccaacagacctgcagctgagggtcctgtctgttagaaggaaaactaacaaccggaaaggacatctacaccgaaaacccatctgtacatcaccatcatcaaagaccaaaagtagataaaaccacaaagatggggaaaaaacagaacagaaaaactggaaactctaaaacgcagagcgcctctcctcctccaaaggaacgcagttcctcaccagcaacagaacaaagctggatggagaatgattttgacgagctgagagaagaaagcttcagacgatcaaattactctaagttacgggaggacattcaaaccaaaggcaaagaagttgaaaactttgaaaaaaatttagaagaatgtataactagaataaccaatacagagaagtgcttaaaggagctgatggagctgaaaaccaaggctcgagaactacgtgaagaatgcagaagcctcaggagccgatgcgatcaactggaagaaagggtatcagcaatggaagatgaaatgaatgaaatgaagcgagaagggaagtttagagaaaaaagaataaaaagaaatgagcaaagcctccaagaaatatgggactatgtgaaaagaccaaatctacgtctgattggtgtacctgaaagtgatgtggagaatggaaccaagttggaaaacactctgcaggatattatccaggagaacttccccaatctagcaaggcaggccaacgttcagattcaggaaatacagagaacgcaacaaagatactcctcgagaagagcaactccaagacacataattgtcagattcaccaaagttgaaatgaaggaaaaaatgttaagggcagccagagagaaaggtcgggttaccctcaaaggaaagcccatcaaactaacagcggatctctcggcagaaaccctacaagccagaagagagtgggggccaatattcaacattcttaaagaaaagaattttcaacccagaatttcatatccagccaagctaagcttcataagtgaaggagaaataaaatactttatagacaagcaaatgctgagagattttgtcaccaccaggcctgccctaaaagagctcctgaaggaagcgctaaacatggaaaggaacaaccggtaccagccgctgcaaaatcatgccaaaatgtaaagaccatcgagactaggaagaaactgcatcaactaatgagcaaaatcaccagctaacatcataatgacaggatcaaattcacacataacaatattaactttaaatataaatggactaaattctgcaattaaaagacacagactggcaagttggataaagagtcaagacccatcagtgtgctgtattcaggaaacccatctcatgtgcagagacacacataggctcaaaataaaaggatggaggaagatctaccaagccaatggaaaacaaaaaaaggcaggggttgcaatcctagtctctgataaaacagactttaaaccaacaaagatcaaaagagacaaagaaggccattacataatggtaaagggatcaattcaacaagaggagctaactatcctaaatatttatgcacccaatacaggagcacccagattcataaagcaagtcctgagtgacctacaaagagacttagactcccacacattaataatgggagactttaacaccccactgtcaacattagacagatcaatgagacagaaagtcaacaaggatacccaggaattgaactcagctctgcaccaagcagacctaatagacatctccagaactctccaccccaaatcaacagaatatacatttttttcagcaccacaccacacctattccaaaattgaccacatagttggaagtaaagctctcctcagcaaatgtaaaagaacagaaattataacaaactatctctcagaccacagtgcaatcaaactagaactcaggattaagaatctcactcaaagccgctcaactacatggaaactgaacaacctgctcctgaatgactactgggtacataacgaaatgaaggcagaaataaagatgttctttgaaaccaacgagaacaaagacaccacataccagaatctctgggacgcattcaaagcagtgtgtagagagaagtttatagcactaaatgcctacaagagaaagcaggaaagatccaaaattgacaccctaacatcacaattaaaagaactagaaaagcaagagcaaacacattcaaaagctagcagaaggcaagaaataactaaaatcagagcagaactgaaggaaatagagacacaaaaaacccttcaaaaaatcaatgaatccaggagctggttttttgaaaggatcaacaaaattgatagaccgctagcaagactaataaagaaaaaaagagagaagaatcaaatagacacaataaaaaatgataaaggggatatcaccaccgatcccacagaaatacaaactaccatcagacaatactacaaacacctctatgcaaataaactagaaaatctagaagaaatggatacattcctcgacacatacactctcccaagactaaaccaggaagaagttgaatctctgaatagaccaataacaggctctgaaattgtggcaataatcaatagtttaccaaccaaaaagagtccaggaccagatggattcacagccgaattctaccagaggtacaaggaggaactggtaccattccttctgaaactattccaataaatagaaaaagagggaatcctccctaactcattttatgaggccagcatcatcctgataccaaagccgggcagagacacaaccaaaaaagagaattttagaccaatatccttgatgaacattgatgcaaaaatcctcaataaaatactggcaaaccgaatccagcagcacatcaaaaagcttatccaccatgatcaagtgggcttcatccctgggatgcaaggctggttcaatatacacaaatcaataaatgtaatccagcatataaacagagccaaagacaaaaaccacatgattatctcaatagatgcagaaaaagcctttgacaaaattcaacaacccttcatgctaaaaactctcaataaattaggtattgatgggacatatttcaaaataataagagctatctatgacaaacccacagccaatatcattctgaatgggcaaaaactggaaacattccctttgaaaactggcacaagacagggatgccctctctcacaactcctattcaacatagtgttggaagttctggccagggcaatcaggcaggagaaggaaataaagggtattcaattaggaaaagaggaagtcaaattgtccctgtttgcagacgacatgattgtttatctagaaaaccccatcgtctcagcccaaaatctccttaagctgataagcaacttcagcaaagtctcaggatacaaaatcaatgtacaaaaatcacaagcattcttatacaccaacaacagacaaacagagagccaaatcatgagtgaactcccattcacaattgcttcaaagagaataaaatacctaggaatccaacttacaagggatgtgaaggacctcttcaaggagaactacaaaccactgctcaaggaaataaaagaggacacaaacaaatggaagaacattccatgctcatgggtaggaagaatcaatatcgtgaaaatggccatactgcccaaggtaatttacagattcaatgccatccccatcaagctaccaatgactttcttcacagaattggaaaaaactactttaaagttcatatggaaccaaaaaagagcccacattgccaagtcaatcctaagccaaaagaacaaagctggaggcatcacactacctgacttcaaactatactacaaggctacagtaaccaaaacagcatggtactggtaccaaaacagagatatagatcaatggaacagaacagagccctcagaaataatgccacatatctacaactatctgatctttgacaaacctgagaaaaacaagcaatggggaaaggattccctatttaataaatggtgctgggaaaactggctagccatatgtagaaagctgaaactggatcccttccttacaccttatacaaaaattaattcaagatggattaaagatttaaacgttagacctaaaaccataaaaaccctagaagaaaacctaggcattaccattcaggacataggcgtgggcaaggacttcatgtccaaaacaccaaaagcaatggcaacaaaagccaaaattgacaaatgggatctaattaaactaaagagcttctgcacagcaaaagaaactaccatcagagtgaacaggcaacctacaacatgggagaaaattttcgcaacctactcatctgacaaagggctaatatccagaatctacaatgaactcaaacaaatttacaagaaaaaaacaaacaaccccatcaaaaagtgggcaaaggacatgaacagacacttctcaaaagaagacatttatgcagccaaaaaacacatgaagaaatgctcatcatcactggccatcagagaaatgcaaatcaaaaccactatgagatatcatctcacaccagttagaatggcaattattaaaaagtcaggaaacaacaggtgctggagaggatgtggagaaataggaacacttttacactgttggtgggactgtaaactagttcaaccattgtggaagtcagtgtggcgattcctcagggatctagaactagaaataccatttgacccagccatcccattactgggtatatacccaaaggactataaatcatgctgctataaagacacatgcacacgtatgtttattgcggcactattcacaatagcaaagacttggaaccaacccaaatgtccaacaatgatagacttgattaagaaaatgtggcacatatacaccatggaatactatgcagccataaaaaatgatgagttcatgtcctttgtagggacatggatgaaattggaaatcatcattctcagtaaactatcgcaagaacaaaaaaccaaacaccgcatattctcactcataggtgggaattgaacaatgagatcacttggacacaggaaggggaatatcacactctggggactgtggtggggtcggggaagggggggagggatagcattgggagatatacctaatgctagatgacacgttagtgggtgcagcgcaccagcatggcacatgtatacatatgtaactaacctgcacaatgtgcacatgtaccctaaaacttagagtataataaaaaaaaaaaaaattaaaaaaaaaaaatttgtttatgaaagtatccattgcatctcatctttgccaaatctcaactttaattagacttctcatttttcaccagtctgatgatggtataacaaggtaatttcattgctgttttaatttacatgtccctgattactagttaagctgaaaataactgtatgatttggagatatttggatttcttttctgtgaataacctgttcgtgtcattttttatttttccattgagttatcttttccttttcaaatttgtgtatctaataatgttacaaacatctcctcccaatatgtggtttacctttgcatgttgtttagggcacagaaagtttaatatagtgagatttatcagtttttcattattgatacctgtgccctaagagtttcctccctacctcaagaccataaggatatgctcttgtattttgttttaatcctcaccctatccctcaatgaggcaggtctttaatgcacttagaatttattttttgtgttgaagtagaaacaagtttttgttgtcattggtatatgagttattgatggtctcaacactattttccaaggggtctgtctgtctgtactgatttgcaaggccatatctgtcacgtaactagctcgcatatctacacgggtctgttgcctggctctccgatgtgtatcatttgtctgcttgctatcatggtgccaatatacactgtctgaatctcagtctctaaggggtctttaatccatgagataattcaagaaccttgcattgttgtcattgtgcagataaatcagagtcaggatggatttttccctagacagacagctcttccatcatgacgtagaacaagtctcagtgccataggaacatagcagaagggcggaatagatttaactcaaacttgccttttacttctcttctcaatttataccctgtgatattacagattccaaacctgtacatgccttctaccaccatcagaggcttctctacatgattctgtactcaacagagccccaccccacactgctggacagcaaagccatttgtcttactaatggtccaaaggaaaggaaagctgcctagatgtcatatctatagcctggacaattaagaagcatttgtgatagagaacattatattggagatgtaaaaagtcaccaaatcctcacgtgtacaactctaaaaagattgagaaaattgaaattaattatccactcactagatggggtgttatctccttggctctctcatgaaaggacagaataaagttattagagattggaagggggcgggggttgagtgtagctacctgcacgtgttaatttgcttttatctcaatttcacatatcagaataataagccaaaataccctcagaaagaatgctagttttgttttaaaaatcagacaacaaaacctcaacgacaccctaaaaatgttgcagtggttgtcaacctccctggacaccagggaacgtcagtggatctgcctcagtggcctcaatcagacgggcatataaaaagcaatgcccagtggtttttctaaacatccwtggtctcttgccaacaattgaggtttaatraagaggggaaaactagacctcagagagtaagtcttctgaaggtggatatttcctggaggcatgtgcaactcccaacccccatcaggcattccagccgggggacatcactctatcattcttcttcaagcttgtagtgtctgattgatttatcgatgtgctgcttctctgagtctccacgggcattttgccattcaagccacaggagtacttaaatgccgaagcctgtgtctctactttcttcccaattcttttttgtctcttctctttcttctgtttctgcttctgtgggtttgtggtcttgtcatagcagattcttagtcattttgactttatagattctcttccactcatctgatattaataggcttttctttaagaaaaaacagattaacaactttggtctattattcttcagaaagatgtacttgaatttgtgtgcccctattcagaacataacatgcgcatattacaatttaaaaaaagtatgtgatattgtctcatggctatggaaagtctgtatcgagaaatttatttgcttgcaatttaatgagttttataataaccagagagtcccttcagcatctcaaatggagcaagaaagttgtgattggctgtcatcaagagaccagggttcctaccttaaaaagccagatcactgtccagcaayaccagcttagggggtcctagatttgggggatcccactgtagtggaagagtcagaagaagtgtgactcacattagaaagttgctcagtattgtttcagatgagaataaagagggctgggcacggtggctcatgcctgtaatcccagcactgtgggaggctgaggtgggcagatcacctgaggtcaggagtttaagaccagcctggccaacatggtgaaaccccatctctactaaaaatacaaaaattagcgaggcgtggtggcaggcgcctgtaatcccggctactagggaggctgaggtgggagaattgcttgaacctggggggcggagattgcagtgagctgactcagagccactgcactccagcctgggcgacaaagcgagactctgtcataaataaataaataaataaataaatattaaracaaaccaacagtccacaaatctttgacccattgagtcttttggtgccctgaggcctatgtgtcactgtgacactaaggccagtctctacttttctctaatttgaaatgytttctaatttaagaagtgaaaaaatcacccaggtgaaatctgaatagtctgttgtttagttcattgtcctgtatcgatattaatttcttagtttttgaccaatgtatcttggctatgtgagattaggagaatctcaggtaaaggaactctctgtattatygttgcaatttttctgtaaacctgaaattacttcaaaataaaaaggttatttttaaacaaactaaccagggcaatcacagatgactcaggctacggaggtaaacctaagtggaattctggctcacgttgaggtagaaaaatcaagagccaaggtgtctgggatgcacagtggggacctcattttaactctactactgactattcttgcaaccttaagccacttaacgtctcttcatttttattgtttattattacaaattaaatccatattaattatataataacacaggcaaacctcgtttcattgctcttcacttcattgaacttcctttattgcacttcacagatactgtgttttttacaaattgaaggtttgcagcaaccctgcatcaagcaagaacaccaccatgatttttccaacagcatgtgctggttttgtgtctctgggtcacattctgggtattctcacaatattttaaaccttgtcatttattacacctggtatagtggtttgtgatcagtgatctttgatgttactattgtaatcattttggggcaccgccaaccacactcatgtaaggtggcaaacttaatctctaaatgtgtgtgtcctgactactctaccatccagctgttcccccatctctctccctcttcgtgggcctccttattccctgagacacagaaacattgaaattaggccaataaataaccctacaatggcctctaagtgttcaagtaaaaggaagagttgaatgtccctcactttaaatcaaaagctagaaaatgattaaccttcatgaggaatgcatgttgaaagccaagacaggctgaaatctaggcctcttgcaccaaatagttgaccaagttgtgaatgcaaagaaaaagttcttgaagaaaattaaaagtgctattccagtgaatacacaaatggtaagaaagcaaaacagccttattgctgatatgaagaaagttttatagagctggatagaaggtctaaccagccacaacactcccttaagccaaagcctaatccagagcaagcccctaactttcttcaattttatgaagacagagagaggtgagaaagctgcagaagaaaagttggggctgggcatggtggctcacacctgtaatcccaaagtgttgggcagattgtaatcccaattgtaatcacacttgtaatcccaaggtgggcagattgctttagcccaggagttcaagaccagcctgagcaaaatggtgagacccccatctctacaaaaaaaaatacaaaagaaaatagccaggcatggcggcctgcacctgtagtcccagcaacttgggaggctgaggtaggaggattgcttgagcctgggatgttgaggccaccataagctgagatggtaccagtgtactcctggacatgcctggacaacagagcaaatccctgtcttagaaaacaaaggataaggttgggcaccgtggctcacgcctgtaatcccagcactttgggagtccgaggctggcagatcacgaggtcaggagatcgagaccatcctggctaacacagtgaaaccccgtctctactaaaaacacaaaaaattagccgggtgtggtggtgggcgcctgtagtctcagctacttgggaggctgaggcaggagaatggcatgaacccagaagatggaattttcagtgagctgagatcatgccactgcactccaacctgggtgacagagcaagactgtctcaamaaaaaaaaaaaaaaaaaaaaaaaagatgaaagaaatgttggaagctagcagagattatttcataaggtttaagggaaaacagccatctccataatataaaactgcgagactgcaaggtgacgcagcaagtgctgatgtagaagctgtggcaagttatcaaaagatctagctaagataattggtaaaagtggctgcgctaaacaatgatttttagtgtagatgagtttttaatgtagacaaacaaccttatattggaagaagatgccatctacaactttcatagctggagagaactcaatgcctggcttcaaaatatcaaagaacagrctgactctctagttagagaataatgcagctagtgactctaacttgaagccaatgctcatttaccattcctaaaatcctagggtctttaagaattatgctaaatctactctgcttgtgttctgtaaattaggacaacaaagcctagaggatagcacatctgtttatggcatggtttactgaatattttaggcctgctgttgagacctactactcagaaaaagaaaataaaaaaattttttcaaaagattactatttggcctggcacagtgtttcatgcctataatcccaactctttgggaagctgaggcagaaggatcacttgaggtcaggagttcaagatcagcctaggcaacataggcaactgtctctacgaacaataataataaaaaaaaaatagccacgcatggtagttcacatctgtagtcccagttactaaagaggctgaggcgagaggatcgcccaggagtttaagactgcagtgagctatgatcatggcactcccagttactaaagaggctgaggtgagaggattgcccaggagtttaagactgcagtgagctgtgatcatggcactgaactccagtctgggtgacaaagtaagatcctgtctctcaacaacaataacaaaggttactactccttaacactgcccctggtgacctaagagctctgatgaaaacgtacaaggagattaatgttgttttcatgcatgctaacataatattcattctgtagtttatggatgaaggcgtaatctcaactttcaagtcttattacttaagaaatacatttcataaggctgcagtcaccaccccccttatcagttaacagccataacatcaagacaagccaggcacagtgactcacacctgtaatcccagcactatgggaggccaaggctgatggatcacctgaggtcaggcgttcaagaccaacctggccaacatgatgaaacctcatttttactaaaaattcaaaaattacccaggtgcctgtagccccagctacccagaaggctgaggcaggagaatggcttgaatccaggaggcagaggttgcagtgagccaagatcgcaccatgcactccagcctgagtgacaagagtgagactccatctaaaaaaaaaaaacaaatatcatcaagacaaaactctccaacagcaaaaagattatgactatttttataagctcagatgatggctgacatttattagcaataaagtattttttaattaagctatgtattttttagacataatgctattgcacacaatagactacagtatagtataaaacatagcttttctatgcactggggaactaaaaaatgtatgtgactcacttcattgcaacattcacttcattgtcgtattctggaaccaaacccacagtctccgagttacgcctatatgtaattatatacataataaattattataaatatttcagaagaaagggcaatcagattcatctctaatatatggaaaaatgaataattacccacagtcacatcctccaaaccacaatttcatcacatatgaaaatccagtatgaacaaatttgcttctgcagatcttctagttgaccccaacagtttcagttccagtatatattcagttctagcatatgcaaatatcaagtcatttttaagaaaagaggaaactaaagggttaggtaagaataaaaatggtatatagaaaatagaggtggcataaactactattaaaagataaataatattgaaagcaggtgaattgtattcttagaagtgtaccttggttctactgggaaagcctttcctgagacagagcatcctgttacaagtatcttggccagaaattctcctgaacagagttaagaacttgtaatcttgtataatgggaaaggagtttcaaaacacttccccagtaattcaccaatctcaaaaattcagtttttcataattccctcagatcaaaggagacaaaagtcaaaagccctgagtcataaaatcaaaataatttttatttaatatttcataacagatgttagctacaaacaaaattaatttcaagtttcttgtgtcaggagaggcaagcattaaaaagttctgaggaggagatcccaagtgaaattgcatcatacacattgttaattacatgaataagtgtcatttatattgacgttattttgcatgctaccgtggttgttttgcttaaaatgttttttgttatactcccaaaatttggtccaaaaacagggaacttctattatgatttctcaagttccttaaccacagttacttctaactggagattttgaggaatttaatgcctayggctgaaaagaaccattacaatacaagcccaatttacctcataggattatttggggaataaaatgagayaatagaaataagtttctttgaaatatttttaaataattttaaattacaaattattgttttttgtttatcaaataagtgaagtatttcttagtgtctgtcagtcattgtacctaggaaggaggtgtaaagtgatgactgtcctcacaaggcaatagggtagaggggtaagtgctcccaggagcactgggggttagagtggcaactgacctcataaagtactggggtagaggggttactgttcccaggaggcactgaggtagagtagtgactgctcccaagaggccctcgggagaggggtgactgctcccgggaggcattggaatagaatgatgactgctcccaggaggcactggggcagaggggtaactgctcccaggaggcattagaatagaagggtgactgctcccaggaagcactggggtagaggggtgacttcccaggaggcattagaataaaagggtgacttctcccaggaggcactggggcagaggggtgactgttcccagaaggcattgggtagaggtgtgactattcccaggaggcactgggatagatgagtaactgctcccaggagacattagggtaggagggggtgactacttccagcaggcactgtagagggtagagtagtgactgctctcaggcagctctagggtagaagggtgattgccttgtagaatccctcaatccagacttgtacagaggttcactacccagaactaagggctaaaatgggataaggaagagtactgtggagcacacacatagcccctcaatcataaattagctaggctttttgagcatgggaagtgggttacagcatgctggtaatgatggtgtgtcagtgggagagaaagatggacacaaaataatttccttatgactagaatgtaaaagagaggataacaaaagacagggctgggaagaaagtctgtgtctagtttatgaggggaaggagttgtaaattatgtttaagttttgttccttatgctgtctgagggaaattaaaatcagagaggattttaggcaaggagatggcatgagtcgatctagagtttggcgaagtatttctgatttcactgtggaaaagagactagagggggcaaaactggcagcagagggacaaatcacgaggccaagtaagcacagctagagatgagagtggcctggatgggtgtgtggcaatgggtccagaggagagtgaagcaaacagacacacatgtaatggcttacaaccaacaggacttgataattgattggatatgagaggtaaaagaggaatcaaagtcttgggcaaccgaaagggtagggttgccattccatgagagaggtaatagggggcaagtgcagatgtaggggtaaagatactgaggctgtttggaggcaaactgagattgacgttctcaggagacatccaaggggcaatgttcaatagacagttggatctttcttgaaattcctccctactttgggactagaagtttgaaacacggagaccttttgagaactctgttattattaatctaataaaagaggaaaaataataaagttgagarggttctgctattttttggaagtgtgagaatgtccagcccaaagcacstatgaaaaagtaactcagacaaaacagaggaatgaaaagttctccatttctgaaaaaagaagcagctacttagcaattatgtgctgtgagatcacttacctttcatggagagtccaggctgccgtttggggaagaaatagtctgccctctggaaatgtcccttaacatggtcatgcatccccctggacttgacataagtcgaggtgagaattaaacttgagatgaaagtgctagagatgtatatgggtcttaaggattacttagtccaattctcccattttacagaggaagaaactagggcccagggagaatgacttgcccatggccacacagctggttagtgggatatagaagccagatatcttggcttgtcttaccttgtcctttaacgcttagatgaaatcacttgaatccccaacccagatcctaaggaacatccagtgccacttcccccacaacttctaaaattcctctgggacttatgtttttcccagtcatccctggttctgatttccagaattttctgtatttctcattctccactctttcctgtggcttttctttaatcatttccctttggcctgaaaccaaagaaggggacagccccttcttcatgacttctagacccccagtcaaatgatgcctttcatagttgacaattctattttgtgaagtttcactaacaattttaaagtaacatggaaggacattatattatattataatattttacatatttctaagtgaatattgactttttaaaaaatctctctgcccttttctgccaacacagacaccaaacctgctaccatcttatctctatttctcatgcttttgccagctaatttgccctccctttccctcccccttttccttttctccttaattcttgtccctttgccttttaccccaaatgctgattaaaagtatattccttccctaggaaaactctgaaggcagccactatcatatcagtttttctcactccatttcacaaatctggtgccacattctctgtgctaagccagatgcctagtccattaaggaagctgctccaaaatttcccagatcttgctccatgcctgcccccacctcagttcttccggggtgtactaattggtatgtaactcacagaccatggatatgtttgaagtgaactgagccagtcaatgtgtactattgtcttttaattgctttcagcttcatgaactttgaacaacttttatcacctctcagctcagcactgattcatccagcttctgtgagrgatttatttacttttaattagatccaacttaattattttgtcagtaaaacataccaaaagaatctataaaacaatttttaagtgaaatcacatttctgcctagagggatgttaaaaatgaaattatgcatctcattttacctgtctctcacaaaggaaatattgcctgcactgtctttttatttcccaagatattttgcctttcattaggaagatacctgggagatcaggcttagaataaagggaagaaaatgggaaaaggtagttcgagttttcaagggagaacacataggtgagcataaaaggcagtgtctctccagatttgctatttggcaacccctacattagaatgacctaggagctggtgaagagtgcagattttccacccccatccccagaacttctgattcagggggtctgacatggggatgagaagtgaagcttctcatttgcctattcttgtgctttctggattcacgcctgcctctggctactcaactctytaattcactaattggctatttctacttccccaagaygcttgccttgtccttctcagtcaactgtgttttcttacatctctaacaacttctggtccttactgtctgccattctttcaatttcccattggtagcctattcagtacctttccatgtatatatatatatctcatctcccaaccattttattatgtcagggactctgcatcactgattttcctctctgcacttcaccttgtaccctgctttcagttctgggctccctttacaataccaatgtgtccaaatgtctttagcacaccagtgtgtgaaagatctcttctgtcatcaaagaatttacaacttctgcctgatagtagctataattctggtattaattaatcgagaaaatatataattgcaaatcctaccataaaattaataatgcctttgaataaaattataatatattaatctcaacagtatctgcgacacttaaaaatagtggcttggccaggagcagtggttaagaagaaaatggatttgaaaaatatttaaagggaaaaaatggataaaacttaaaaatagattggctgtagtaaatgaaagagaggtcaaaggttactcttaagtcattaaggtaaacagagatgctattcacggaaatgggtactcctggaactaaagtgaattttggagagaatccaagagttttacaatgttaaagttgaaatacctagaaaacaagtagaaatggcacatragcagtaggatattttgatgtaaagttcgagggagaaatccgagctccaaatacaccaaattggagactagcttgcaagataatttgtgagactctaaactctaatgaacttggcaggtgataaagtgtaatgtggcagatgagaaatattttcttgtctgttaaaaaaatattcatctttggaaatctgttggagtaaagctcttatgagttggggagctaggagaaaaccaatcgggggttaaaagctttaattgactcaaggactagtgatgagggctgagtgtggcatgctgaagatgcttgagttatggaacagactctccttccatctttcctttcccacaaaggcccattctataggattacatttatcatgtattttaattatcttctacagaactgcatcctttcattaattttattttaggtggttgctatttctttctcactctctcttttccactagtccccacttttaccaaccaaagacaacaatccccaccccaccccaccctgcatacatttcttcttaatgtttctttctctctagaggaagtcagcttctggcatcctaattataggacatgttttgtagcctgtgaataaggcacaatcacagctcttgttcttcccattgggaaggacagagcacttttttgtgctcataagaactgattccatacaagcagctatatgtagatgcctgtagctgagtacagtgcaaatgggaatgctaaagttcggccttccccaagtcttctagcctatccaaactccactgcagaataaggtctccgctaagactattcctttcccacgaaggcctcactgaattttcctgggcaggtccacactacaaaacttatggagggtctttcaaatggcaatttctgttttctggcatatttgtctgcaactagatatcttttttgaatctaaaatgtcatcaatttaataatactttgtgagtgtaagtaaataaacactaacatagcaattgtgtgaaacaatctagtttcaaaaatttattaaaatgtggaaaaaggacattttgtattctaataaatawagcttttactgaaatggattaggaagaaatgacaagttctacagagaaatcactctattccccttatctttgtttcttcctctgtaaatgggtttcggtaaaatcagtaaaagactaagtgatggtcattcctcaagcaaatccaatcaaaataagtagaaaaagcaaaatggataagaaatttatgatgagattgttttactgcaaatcattccttgatctactacaatgcttgggtgcatggataggaatctggctcactgagtttttttattgaattcagggttgatgaaaaacctgttgtttgttgttgttgttattgttttgactttgtgttgaggggaagaaacttgcaaaccatgttagcagcctttcctgcattagtaggtaagccacaaataatggaaatgactgatcctttctgggtgagtggtgatgtttctgaacctggttcccagaacagcaaatagagacatagaggtgtaggccaatgttgtcataagggatcaagagtttttattttaataaaagtagttcctgtcagtgcctattaaaaaaacatatcaatactgtcaaaccacttcattttggtattaaggtttagctcaaaaccaaagttaatattgaagcttttggccaggcatggtggctcatgcctgtaatcccagcactttgggaggctgaggtgggtggatcacctgaggtcaggagttcaagaccagcctggccaaaatgggaaaccgtgyctctacaaaraaacacaaaaaattttgccaggcatgatggcgggtgcctgtaatcccagctactcaggaggctaaggcaggagaatcacttgaacctgggaggcagaggttgcagtgagccaagatcatgccattgcactccagcctgggcgacagagtgagactatctcagtgaaaaaaaaattgaagcttttgagaagtgagttcacctaaagtaaaatatattgcatttaataaaaatgctatttgggtgtggtaaaaattgagaagatgattcaagaatgactgtaatttgtgaaaaactgatatacttattgatttgaagatctgctaactccagactatttcttctacagtggttattatttgttaactagatatctaataggaaatcttttctttttttttcctgcgatttacacattttgtcctcagggtagagtgctttaaaaacgcctgtagttaactgaaggccaaactttttaaaattctaattcattctaatatcagggttttatattattttatcaataatctaagtatagattaaacttaattttatagatttttctcccatagtcctaacccactgatatgctttttagagaattgggtatggaggaaaaataattctctagtaaagacttatttctgctttttagcctacttgggtcttctatccattcttgaagtcaacatgtttactgtagccacagaagacttgcaactatggctttgtcttcctaggatgcttactttcagaaacacagcacatacacacacacacacacacacacacacacacactcactcacgcatatatacacacagtagtactccatccagccacctctcactcattccctgatctcagttcaagccccacctcttgggacacaaggtcccatccctctgtaatgtgctcactgcaccctctctcttttgtggtattaaataaaaattacaggaggccattgttttggacaaagctaggccccaacagactagactaaaaattagagtggagtcattttcactaaactaaaactaaattgttatcaaccttcagagaaatcaagagagagacataatttcccaaataggtcagtttcaattggtatgaaaaggaagttgcccctgcctttaatccttacaataaaagtaacctgatgttacccagtcagttatttttctattgttctgtttcctgttcctcccttacaaggaaactaattttgaaatgacgaaatcatttttgttttgtgtttctgctttcttcagccctttctataaagccaatctcctctgctcagctcattggaacgctgattatattttatgaaatgaagtgctgcccaattttagaaccaaaaataaagttaattaagatctttaaacctgttgtgattttgtcttttgacagtggcacttttcctggttggtgaatatatatttatttctaaacgtgtatgtttaaaatctcccagacacctaatgtaagctcaggcagaaagggatgcatgggtaggttttactcacctggtatataaacgaggattcaataagtatttgttgattgaatgaatgactagttgatttatcccgtaacagtgaaaatggaacttgctagagatggggtttatttgggctcattaaaatgaaacagaaaggaactggagtcaattggaaatgtgagccaggtaacgtggagaaagtttgggagagagaaacagaattcctcaaaaaactgaagttagcccagcttgttaggctaaaggtcccccatataggattgtcttcttatcatctagaggacattgtacctagaagagaataaggctggtgcttgagaggattatcacttcaagcctgaggtgatctgagtataaattagcaaaattaggtaatcctcaagttatttttagtgggaggtgccatttcaaaaatctagaatgagacaaaggctttacaactggaaggaacttagggagttcttcaggtgtgccccaccctaaactttctgcaggcagcaataaaccacacctcagataatgggattatgcaatccctctttgtttcctgttccactctcaggaagaagtattttatttggaggggagaggggcagtgggtcaaagagctgcctctagcccccagtttcggtccctccagcccacccttatgtgcttcggccagaatgatgcttggaatccgcactcacaatgtgtcatttccctggcactcttcagactctctcttgccctcagcataacagcctcagcaggccatctgaccctgggctgtctctccagcctcagcttctgcccactctttgtctcccgttccatgtactctacaccaggagtccccagtccctgggccacgggcccatagcagtccatggcctgttgggaaccatgctgcrcagcaggaggtaagtggcaggcgagcattgcctgctgtcaratcagtggagacattaaattctcataggaatgcaatgctattgtgaattgtgcatgcgagggatctaggtcacgccctccttatgagaatctaaggaatgcctgataatctgaggtggaacagtttcatcccaaaactatcccccaaccactgtccatggaaaaattgtcttccatgaaaccagtccctggtgccaaaaaggttgaagacctctgctctatgcaacacctcaggaacttcttcccgtttctggaactcgttcttctacctggagcactcttccccaacctctctacctagctaactcctgcgtttcttcaggtamctttaaataaatgttccttttcccacgagcccttccctgactataccactgtgtgtgtgtgtgtgtgtgtgtgtgtgtgtgtgtgtgtgtgtgtgtgtgtgttttctgacccatggaaacatcttgccctttacctctaaatactttggggtggatttcctaaaaccaagagtgtttttatgtataaycacaatataattatcaaaatcaggaaatttgagattgttaaaatgctattacctaactgtagtttatattcagattttgcccattgtccaataatgccctttatacctattttatcttcctctagtataggattcaaccgagaattatgcattacatttagtttttatttttagtttattttaatcataaacaattattttgccccttttttgaccatttacacttgaaaaacacaggccagttgttttatagaatagccccccaatttgaggttttttagtgtttctaccagagaggtaactcatgttctcaatacatcatatcaggaggcaaaagatgtcattttatctcaatatttgtgatactatagccataataggtccagcgcccaatatgtgcagcaaatcaatatgccaagatgtcaagttgcaggagaaagagatttaattggagggctaccgaataaagagatgggaggaaacctcaaatccacctccgtgaggagtttggggctaaagtttataagagttttagaacaggcagaagtgtgaagattgttgattggtcaaagagtgcagggtgaaatcataggacagacagatgaagaaactgtcctcatgctgattctgttcctatgtggggtcttcaaactggttggcgtcagctgtttcaccggacttcagaatctgaaaaacatcttcagcaattcttaaacaaaagctttatgattctaacatcagaaactcaatcttaaacaaaacccttatgactctaatgtcagaaatcctatctttaggagcaatggggaagcaaatggtcaggatctagtgactttcagttacaaggaagtaggtcaaagtgcagcctgattaatgcttagttatgactctatttctgtccagaattcttgttarccctgtgaggacagcttcaatacttgctttgatctctgttgtaaggtggtgtctgccacatttctccactaaaaagtgattctttttatcattataatgaataatattgggggaggatactttgaaactatataaatatttagttcctcatcaaactttcattcactaatttggcatccaagttatatctgctttacttttaaggaagctcatcttacatggttaaaaaaagtaaagactattcttatgataaatggacttttaatcctactccaccgaaaataactacatttcccacatcaatccaatctcttcatttaagaagatcttaccacctaatagtgagagaagtctgatatggatggcattaaccaaggcaagatttctcatttgcattttcaatgctattcataaattatcttttcatttccttttcctttgcagtaaaaaagaaatccatgaaggtgcattttttataatagcaaagaagatacacaatattatttccagcttgctaaatgttataaggttgcttttggtcacattatgataggcatccgtaattacatttaccttttcaggcttgctacaagggcttacttagtctctgaagagcttcctgcaggcttggggtctgtggactgaaaatcagttggattgaygaaagctatgagaagaattatgatgagggtcagatcatatgggcatcaggaaagtaaaatattaccatttaaactagaaataaaactttttttcctaagtgatcatatttaccatgacaagctgggtaattaattgtaagattaatagtacttgacattcactcatccacttattcaaaagaaaattatcctatgagcctactacatgagaaggaccattatatacaacttctaactttataaaatgtatctttgaataatatccttctgggtctttaagaaaaatttggccaaaaagaaccttgagagtttgcttgtagggtttatttaaaagagttcagaaactggaaactcctaggtaaagcagcattttttttaatcattattatactttaagttctgggatatatgtgcagaatgtgcaggtttgtgtacataagtatacctgtgccatggtagttttctgcacccatcaacccgtcatctatattaggtatttcttctaatgctatccctcccctagcccctaaccccacaacaggccctggtgtgtgatattcccctccctgtgtccatgtgttctcatagtgcaactcccaattatgagtgagaacatgtggtgtttggttttctgttcctgtgttagtttgctgagaatgatggtttccagcttcatccatgtccctacaaagtatatgaactcatccytttttatggctgcctaatattccatgctatgtaygtgccacattttctttatccagtctatcattaatgggcatttgggttggttccaagtctttgctattgtgaagagtgctgcaataaagatacgtgtgcatgtgtctttgtagaagaatgatttataatcctttgggtatatccccagtaatgggattgctgggtcaaatggttcttctggttctagatccttgagaaatcaccacactctcttccacaatgattgaactaatttacactcccaccaacagtgtaaaagcattcttattactccatatcctctccagtatctgttgtttcctgactttttaatgatcaccattctaactggcttgagatggtatctcattgtggttttgatttgcatttctctaacaactagtgatgatgacctttttttcatatgtttgttggccacataaatgtcgtcttttgagaagtgtctgttcatgtcctttgcccactttttgatgggattgttggttttttcttggaaatttgtttaaattctttgtagattctggatattagccctttgtcagatgcatagattgcaaaaattttctcccattctgtaggtttcctgttcaccctgatgatagtttcttttgctgtgcagaagctctttagtttaattagatcccatttgtcaattttggcttttgttgccattgcttttggtgttttagtcatgaagtctttgcccatgcctatgtcctgaatggttttgcctaggttttcttctagggtttttatggttttgggtcttacctttaaatctttaatccatcttgagttaatttttgtataatgtgtaaggaaggtgtccagtttcagtttctgcatatggctagtcagctttcccagcaccatttattaaataaggaatcctttccccattgctygtttttgtcaggtttgtcaaagatcagatggttgtagatgtgtggcattatttctgagtcctctgttctgttccattggtctatatctctgttttggtaccagtatcatgctgttttggttactgtagccttgtagtatagtttgaagtcaggtagcatgatgcctccagctttgctttttttgcttaggattgccttggctatatgggctcttttttggttacatatgaaatttaaagtagttttttcaaattctktgaagaaagtcaatggtagcttgatgggtatagcattgaatctataaattactttgggcagtatggccattttcacgatattgatttttcctatccatgatcatggaatgtttttccatttgtgtgaccagtggtttgtagttctctttgaagtggtccctcacatcccttgtaagttgtattcctaggtattttattctctttgtagcatttgtgaaggggagttcactcatgatttggctctctgtttgtctattattgctatgtaggaatgcttgtgatttttgcacattgattttgtatcctgagattttgctgaagttgcttatcagcttagggagatttggggctgagaatatggggttttctaaatatacaatcatgtcatctgcaaacatagaccatttgactctctctcttyctattcgaatacctttatttctttctcttgcctgattgccctggacagaatttccaacactatgttgaacaggagtggtaagagagggcatccttgtcttgtgctggtttccaaagggaatgcttccagctttttccattcagtatgatattggttgtgggtttgtaataaatggctcttattatttcgagatactttccatcaatacctagtttattgagagtttttagcatgaagggtgttgaattttatcaaaggccttttctgcatctattgaggtaatcatatggtttttgtcatggtgtctgtttatgtgatgaattacgtttattgatttgtgtatgttgaaccagccttgcatcccagggatgaagctgactcgatggtggtggacaagctttttgatgtgctgtaaagcagcatttctttgccacctgggcagaccatctgcttaatcaagtacttggtttcagaaaccaccaaatggagtggagaaaaagaaaagggatcccctatccccaactccagccatctagattaagaaaagccagctgactggacagtagcacagcccagtcacctcatggacaaatttcctaggaaagaacctctcccatctattctacttatcactctcctttgaggttccggccacaggtgagtttctggaaaatgtcatcagaatcagaaaatgttagcgccaaagaaaacctaaagaataggtaccttttcctttgttttaagatgtgtcccaatatatttttctgtactatccaatttgttcctcacaaaaatcttgtggaataagtatagaaagaatagtgttcctgatttcacagtgaggaagctggagatcagttgaaggtgaaggaacagctccccactaggactgaaccagagctagtcttctgacctgcagggtcatagcccagcaagccacactttagctatccctgacagccccaattaggccaaaagcacgtcccacccacttcaatgctcccatggcacgtattccagtgttaggagcatgttatttatgtgattatttgtttagtgtgtyaccctagaacatagggattctaacctcagatactcaatcttaaacaaaatccttatgactctaatgtcagaaatcctatctttaggaacaacagggaagcaaatggtcaggatctagtgacctttagttacaaggaagtaggtcaaagtgtgggttaagactactttcagtgtctaccctgcatggatgggggagaaatgaacaggccaacatgctgcacgtttctcctaaacatagctcctcctgtgtctgttttcagatcttcgcctgctgctggaaatggccctctcagtggactcatcgtggcatcggtggcagtggagagtcagagatggcttcccccattgtccatcggaaaccacaccgctgctctctccagagaaagggagacagagctacaacttgacacagcagcgggtcgtgttccccaacaacagcatattccatcaagattgggaagaggtctccaggagataccctggcaacagaacctgcacaaccaaatacaccctcttcaccttcctgccccggaatctctttgagcaatttcataggtagagatccacttgtctgaacaatactctttttagagaaagagtctcattctgttccccaggctggagtatagtcgtgcaatctcggctcactgcaaccttcacctcctgggttcaagggaatctcccacctcagcctcccaaatagctgggaccacaggcgtgcaccaccatgcccggcaaatttttgtacttttatgtagatatggggttttgccacgttgcccaagctggtctctaactcctgggctccagtgatccgcctgcctcaacctcccaaagagatgggattacaggagtgagccaccacacccggccaccaatacatattttaaacaagtatttaccacttagataaactcagagatgctaccctctgggggccacctttcctttaatatccaaatgcatttgtcttaagaagttttttcattcattctttcattcaacaaatatttgtcaggttctatgctgtctcaggccataagctgggagctagagatacataaaaaaaatggagaggcagagagatactgtccttattgaatatattgtctagtaaaagagacagacattagttttttaattatataaattgatataaagttgtaactacaatagatacttctaaggagaggtatatggtgctattatagtgaataataaggaaatcttggcctagttaagaaagtcagggaattgaagtacaacatgaaagagagactgcattacctgagtgaaaagggatggacagaagtcagcagaatgttcctgcagacagacctgcacatgcaaaggcactgtggcaagagagagcaagatgcacgtggaaaacttgaaaacatcagcaactcttttgagataatgtatgagatcattttaaattaaaagttaaaatatgtgcttatatatcaccctcaatattgtaattattattataagtgaccatttactgagcaactgctatgctccagagccctctactgtatatcatgcaaatattatagatcatgtaatatttatgggacccctttaaagtccataatactatccccattttgtgcaagaggaaataagctcaaaaaaatcacacaacgagtaaataacaggaacagaatttaaatctaaatggttttccattcctgagaataatcatctccagtctcatccataagcatgacaaaacaaactttggggacttagggggaaagggtgagaaggggagaggaataaaagactacaaattgggtgcagagtatactgctcgggtgatggatgcaccaaaatctcacaaatcaccactaaagaacttactcatgtaaccaaacaccacctgttccccaataatctatggaaataataaatacatctagatgggtttggcttcaaatccattaccataatgtttgaggtgatactgaaagagaaggtttaattgatcaaggccaaacagtagggaagaaatgggggagaaagtacatttttcttctccatagtgtttattcacacttcgcttgcccctccagatgggctaacctctatttcctgttcctggtgattttgaactggatgccctccatggaagtcttccacagagaaatcaccatgttaccattggccattgtcctgttcgtcatcatgatcaaggatggcatggaggacttcaagagacaccgctttgataaagcaataaactgctccaacattcgaatttatgaaaggtaagaaaaaccatccctgtgttctctcttgcaaatgggttaggcaaactcatcagcatagcctcaggatgagtctcttttcttcgattttattttcctaaattatttaattcactgattctcaagggggggtgatttcgacccctagtgggcatttagtaatgtctgaagacatttttggttgtcatactgggagtagggggtactactgacatctagtgggtaaaatccgggggttctgctaaatagcctacgatacacaggacaccaccggggaacaattattaaccagtcaaaatgtcaatagtgctgaggctgagaaaacttgtttaagttgtataagcactcatattattaagcacacagatgcagtattattaaaggtgagttgaaagcttaagaattaaactctaggatggctggattatcttgggagactaagttcaggagaaactctttggaggatgtcaggcagtgtctcccaaaccaagaaaatgtctgccattttaaagcctcagttgcttgggttgaaaattcttgcttttagaaccaggtaggttttaggacccagagttggtacacctgttcttggctgcccagggtggaaaaggaagacacctgtaggtgacgtctacattccaacaggtggagtctcaaacaagtagaaggaagtggcctggtggatacacacctgttctctgcaggctctttccttgtcatgtttctcccctggggtttgcagcctggcttttcatttttagtatccttctgaaagaagagagaaaaattttcagcaaagaaggcaagtaaaagatgaaaattaaattatgagaattaaaaagacaacattgagcagagatgaaaaaggaagggaggaaaaggtggaaaagaaaagaagacaagaagcgagtagtggtctctaacttgctctttgaaggatggtctcacaaagagaaccccaacagacatcatcgtgggaatcaaatcaagaccagcaagtacaccgtgttgtccttcgtccccaaaaacatttttgagcagctacaccggtttgccaatctctattttgtgggcattgcggttctgaattttatccctgtggtcaatgctttccagcctgaggtgagcatgataccaatctgtgttatcctggcagtcactgccatcaaggacgcttgggaagacctccggaggtacaaatcggataaagtcatcaataaccgagagtgcctcatctacagcaggtaaagcaaaaaactctggggaagtcttgggcccagcctgatctttttgtggctgctatcactgcagttactgtttgtagaagggatggagtagggagatatcattattttatttcagggaagctgttcagttctctacagtgagctttatagtctacaatccagaaaaaaggaggattgagtcagtcttttaaaattaggaggtctttatcatgtagcattttcttcactatttcaaatgtgtctaacatttaacagttttgcatatattctcatctcctcttaacccagtgtggccatgagcacatttaaggctggttgaggacactgggagggaagaggcatcactgtatttgggggagcaatggagtattgtgttaggagaagcacaacaggagacccactgcctgagttgaacagcctccagtacttactaactgcctgactttagacaagcaatataacctctgaaattcattttgtaattcctaaaatttgaacaattcctgaggtggttgtgagagttgcaggagataattcttagaaaatacttagcacagtgtatgacatacaacaaatgctcagtaaatgcaagctgaaattgcattatttttagaatgtcaaacccaacgtttccttcatcactaactctgtttttgggagttctccctgatgttgtcttaaccaaagcaaagactgcacaccacctgtcctgaagctgagaaaccttgttttaacttgtgtaagtgctcatattattaagcacagagatgcaatattttttagggtgagttgaaatctgaagaattaaactctaggatgactggactatctgatgtcattagacatttatttaatgtcattttatacatgtcattgttctacaaaggtttcattgagcaaatgactaaactaggttgtcaggataggacatgctctcacttggcaaggaaagaagacagagttagagtgtgtctcaactttgtgataacccacatagtcctaaaagaagcaagggagttgagtctgggctcacagagagactagagggacaaagcaccttcagagctagcagttggcagcctaagatgatggagtctctagcaggtaagagcttgacttcttgctgaagaaggaaaacatccatgtctcacaagcagcaccctaggccatctcattccttttgactctccagcccagttcagcagacattccgcactggctctggtccttgttagaatgaaagaggcttgcttcgaggtatgtactccagccatttaggcactgcttacttctaaggaggggttctcttctccaggggagtgaaaggtggccagcttagagctggctgctgaaaggatttatgagtcaaactccacttggaaaattgtagccaggggaaacctccaagatgagtatctaatacaatgactttagatggtatttaccaatatcatccaagaacccctgcaagaaactccatgttcatccctcagcagcaaatgagcttcttgtctctttgcttggagggacacagttgcacgtttagaaaaattaatctgaaggataatttttttttccagctagatccaattgtcttgaatgttatgagcacactggacagccagagttaacatttagtcgttcctcgcctttgaatatgaaaattataaagagaggatgaaatcactgctggggtgtgatgccttcctttgaaaaagcggtgtttgagaaagcattgtttttcttttttttcttttcttcttcttctttttttttttttttttttttgggggggacagagtcttggtctgtcgcccaggctggagtgcagtggcgccatcacagctcactgcaagctccacctcccgggttcatgccattctcctgcctcagcctcccgagtagctgggactacaggtgcccgccatcacgcctggctaattttttgtatttttagtagagacggggtttcaccatgttagccaggatggtctcaatctcctgacttcgtgatccgcccgcctcggcctcccaaagtgctgggattacaggcgtgagccaccgcgcccggccgagaaagcatcgtttttcttttggcaccaatccaccgtcactttttgttttccaccttactgtcttgttttttttccatggaatatacacagtggcaagccaggaagctggtgcctcagggaggaatgcacgtgggctgcagtgagcctggtcctgttctcctcgctctgccagaatatcgcagaatcatggcctggttcttgggaataatctcagtgtggattagaccacagactcatctgtgctgggagctggcaggacctaggccaggctgctgttgttgtttccaaaatagcttccagggaacatcggaaaaccaagatgataacaatctagaaaaaagaaacattagtccaccagctcactggcagggaggagcatggagttttcatagcagtatttcccaaagtgtattcagtggaataacagtgacaaagaaatagtctccgaaaaaatacgtgcatggccaaattatatatgctggccctcctccaatggacccatagcccatgaaggactaagaaaagacacagcaaagaaacctgttcgtctttgattaactcagtgttgctttacatttactgggctttggaaatattttttaatatctaagtttgggaatttttactttttcaagtatacaaaaataattggctacagggaccagataggtaattaaatggactgaatagtttataaaaagcagtattactcacggactgataaatggccaatgacagttggcatcagtgttaggaggcaatagggaatggtggtgactatggcaaagtggggaggccatgcatttatcctaggaggcagagctggtcacttagcttctgctaattgttattatgtagaagta

SEQ ID NO: 96734 - DNA, 255775 bp, Homo sapiens
aatgacagtgtgaataaacgagtatgactggctcaattctctgcacctgaggggaaaatagcaaaataaaggagtgacacaggaaagaaaacaaagaaaagaaaaaagtacttttgagtgggagtaaggggcattttccaagtgaaaataaaggggagaatgctggggagatgattccatacatgttcattataggaacagaagagacatatcctgatagtggattgaatgggggagagaagtgtgaagaataaatcctgggccaggcctggtggctcacacctgtaatcccaacactttggaaggccaaggtgggaagattgccagaggcaaggagtttgagaccagcctgggcaacacagggaaaccctgcctctacaaattattattattattattattttgagatggagtttcgctcttgttgcccaggctggagtgcaatggggcaatctcagctcactgcaacctccgcctcccggattcaagcgattctcctgcctcagcctcccaagtagctgggattacaggcatgtagcaccacacctggctaatgttttgtatttagtagggacagggtttcaccatgttggtcaggctggtctcgaactcctgacctcagatgatccacctgcctcagcctcccaaagtgctgggattacaggtatgagccaccacacccggccaatatttttatttttttgagatggagtctcactctgtcaccaggctggagtgcagtggtgcgatcttggctcactgcaacctctgcctcttgggttcaagtgattctcctacctcagcctcccaagtagctgagattacaggagcgtgccaccatgcccagctaattggccaggatagtcttgatctcttgaccttgtgatccacccacctcggcctcccaaagtactgggattacaggtgtgagccaccgtgcccagccaaaaatttttctttaaaaagagtaactcctgggttttgacttaaatggtggtacaatttgttgagatttaaaacaggagaagaaataagtatttgacaggaaaatcagatttgattagctaagtttgaattgtttatgaaacatccaagaggatgtcccttttttaaaaattattttttgccagaaatgtgtgtatattagtatctgctttatttctgaagaatgagcttttcaatctatttaaagtacagctctttttcccttatttctgattgtttactctgccattttcctttaattgtcttctatatttgttgaatgcttagcttactaattttcactttaaaaagaaagcatataaggttacttatatgatttttcctctgagaagtgctttaatatcatggattccattatgcaatattttcattattataatttctaaataatccaatattttagtcttgttttcttttttgacccatgaattatttaaaattggtggtttttttgttgttttttttttttaaaaagacatttattcagtgtcacgatcagactattacatttagcaatcaacagcttgggtgcaaaaaaaaaaaatacattaaaaccctttgttggaatgctttacactttccacagaacagaaactaaaacaacctgttatacaactagtcacaaatacagtcttcgagttttttgcccatacacatgagtatttgtctaaaacatatcttctttgtagcagctaggccctgccaccactgtgcttggcttagttcacaaatctgttgtaacctgtagcttccctgtcacttcgctggctctcctctcatgctaagctttgttgcctaattaaaatcttccgccactgccatagctactgctgctactggaaccgccatagccaccttggtttcgtggtttggtaaagtattggcctgcaccaccataggggccagagcttctgcctccaaagtttcctcccttcatgggtccaaaaattgaagactaattgttgtaattgccaaaatcattgtagcttccacctccaaaattgcttccatcattaccaaatccattatagccatccccactgcacgatatccaccaccaccacagctgccaccaaagccaccatgaccactgaaatttccttcacaaccaaagttgtcattcctaccgaaaccacctccacgaccaccaccaaagtttccagaagtactttgacctctttggctggatgaagcactcaccatctcttgctttgacaggcctttcctaatttcacagttgtggccattcacagtatggtatttctgaatgacagtcttatccacggagtcatgatcatcaaaggttacaaaggcaaagccccttttcttgccactgccttggtcagtcatgatttcaatcacttcagtttttccatactgttcaaaataatcacttaggtgatattcttcagtgtcttcgttaatgccaccaacaaatatcttttccatagttaagtgggcatctggtctttgagaatcttctcttgagacagctctctttggttccacaactcttccatccaccttgtgtggccttgcattcgtggctgcatccacctcctcctcagtggcatatgtggcaaatccaaagcccctggagtgcttggtgtttggatctctcattaccacacagtccgcgagtgttccccattgctcagaatggctcctcaggctctcattggttgtttcaaagctcagccctccaatgaagagcttcttcagctgtacgagctctttaggagactctgacttagacttggcggtgtccatgggtggaaagtgtttgttttgttttatttttgagacagagtctctatctgtcacccaggctggagtgcagtggcgtgatctcggctcactgcagcctctacctccttggttcaagtgattctcctgcctcagtctcccaagtagctgggattataggcacccaccaccacacccggctagtttttgtatttttagtagagacggggtttcgccatgttggccaggctggtctcgaactcctgacctcaagtgatctgcccaccttggcctcccaaagtgctgggattacaggcatgagccacggggcctggcctaaaattgttgtttttaaaaaaattccaaatggttagaatgttttgcttcatttgtggctattcacttctagttttattactttgtgctaagtaaatatgacctgtacaatttttttttttgacggagtctcactctgtcgcccaggctggagtgcagtggagcaatctcggctcgctgcaacctctgcctcccaggttcaagcagttctcctgcctgagcgtcccaagtagctgggactacaggtgcccgccaccacacccagctaatttttttgtattttagtagagatggggtttcatcttgcccaagctggttgggaactcctgagctcaggcaatctgcccacctcggcctcccaaagtgctgggattacaggcgtgagccaccgcgcccggccaacttgtacaatttttacttttagaaactgaattcaaggctgggcgcggtggctcacgcctgtaatcccagcactttaggaggttgaggcgggtggatcacctgaggtcaggagttcgagaccagactggtcaacatggtgaaaccccatctctactaaaaatacaaaaaattagctgggcatggtggtgggcgcctgtaataccagctactcaggaggctgaggcaagagaattgcttgaaaccaggaggcaggttgcagtgagccaagattgtgccactgcactccagcctgggcaacaagagtgaaactccgtctcaaaaaaaacgaaaaacaaaaaatctcagcagctttcattgtgatactgacttaaatatggttgtctttcttgtcatttctttttacctggtatttcatgaattctttaaatctgataattcaaaaatttccaccaacgtagtaaattttcttctactatttgattattgctcttctgcagtcagctgtattatccccttctggaactcgtatttaattattaattttttgtaccccttctccatgtctcctatctttgtctctcagtttttatctattaccttttccttctgagttctggtaaattttcttgaactggtttaacttttggcatatctaatctgcagttcactgacactgttgcattaaatgggtggtgccatttgtcctaagaaagttttcttgttttccattatttttccagctgaaaaaagaaatcatgcaatggcctctcaaatttcaatatgaaacagattattttttaacgcttcttcctatttctctcaaatctggtggcaaaggctgtcttctgctctgaccactcaaatggttcctcttctgaactgttggatcttttcacccatcatctactgactttcttcttatgcttaaccttccggtgacaaagtgtcacgtaaaaggaactgaaggagttctgtcagaggttgtggcaatcccttcggctcagactaaggaataattggtaactattctgtgatgggtgtggggtaaaagcctatggggctgtggaggggcaacaggtggaggcaggaggccttggggaagggagcttcacctctgtacagttctccaaaaaaagattcaagtaccagccttctggtatagttcaattttaaagatgggaaattaaaaagtcaacctgagatccacagcagtaatttttttcaagaatccatagtgacacagaaattcccaaattgacttttttttttttttgaggcggagtctcgctctgttggagactcccgggctggagtgcagtggcgcgatctcggctcactgcagtctccgcctcccgggttcaagcgatccgcccgtctcagcgttccgagtcgccgggattacaggtcccaaatggacttatatgcctcctgatgtacttccttccacacgattccaactatatcgtatctagtttttaaaagtcagggggcggccgggcgcggtggctcacgcctgtaatcccagcactgtgggaggccgacgcgggtggatcacctgaggtcaggagttcgagaccagcctagtgaaaccccgtctctacaaaaaatacaaaaattagccgggcttggtggcgtgcacctgtaatcccagctactagggaagctgaggcaggagaatcgcttgaatccaggaggcagaggttgcagtgagccgagaccgcgccactgcactccagcctgggcgacagagcgagactccgtcttaagaaaaaaaaaaaaaaaaaaaaagagggtttggggatgtggcttgctgtaatgaaaaaggctttgataggttttcatccacggtgtcaccctgggcaatttacttccgttctctgggattcagtttcctaatcttagaaatgggaatagtagagaggctgaggcgggagaaaagcttgaacccgggaggcggagcttgcagtgagccgagatcgcgccactgcactccagcccgggagtctccaacagagcgagactccaactaaaaaaaaaagggaatagtaacaactactcttagcagatcttcaaggtcccaagtaatggcccgcggcgctaggccgggcctgtggcgggagagcctggcctaaggtgtccagaggagcccaggctgaggggtgtctctgtcaacccgagtcccagactagcagtgtccttggtgtccacgacaacagcaacggcagccaccgccgcaaacgcccgcctggcctggcacggcccggcctcgcctcacctcagctcaccggcgccgcgcctccagctccagcctccgcgcgcctccccggccgcacctctgcgcacgcgcagcccccgcccgccccacccaggctctcgctccggtcccgcccctctggaaccggcggcgggcgcttttcctcccagcgcggccaccgtcgttcggaaagggagggcggcagggggcggggaaaggccgggaggtgggcgagcgcgcgcgccgcccgtctgtggtggtttcctggctgcgcgcggcggtggcggagccgctacggctgtagcagcagccgcgaagatggcggaagggctggagcgtgtgcggatctccgcgtcggagctgcgcgggatcctggctactctggccccgcaggccgggagcagaggtgagtcgcgccgcccagctcctgggccgggcctgcccgccccgcctccctctcctcctcctctgcctcctccccgctcggccctcggctccggagcccccgccccttcccccagcagtaggcgctggggccgcggcggaccctcgctgccctacctctctcgcgggttagtgcggggtcgggctcggccagtcctggccagctccgggagagcctggcccgaattcctgcctccaccctctttctcgccgcgaaggtgactgttccttttgccccagccctctcagacccgccccggattcccaggcatcgggagacgcggaaaggagtggggtctggtggaggccccgggcgtatcgctctccaggccgccctccgcgggcctgccccggccaccgctttaacgtcggagagaaggaattggggagaaaggtttaagagcctgcgacttcgttgctgaacttttcccccccaagacaggcttccgaaagctgcgccactggagggatccgggacctcagactactcgggtttggccctggcatgtgtgggagcagtttttattagagagaatgctcaatttgcaagttaatttcaagtctccagccacgtcaggaaagtaagaaagattctaagtgtctcacctctcctgcgttaggcaatagagttgtgtagaatggtagctgtgataggtgccttctctaggtttgcggccagtctgtgaaattggtttttgttgattaacataattggattattaaggctattttctcccgctgctctagaaagtagtaggaatagctttccccatcyccccgccccccaccaagttacagactgccgagggtgagctattcttgggttaaactgctttatctttgtggatacttcatgaacctaccttttaaacttatgaaaatagtgaagcactatccaaaacctcagtctcttttcttccccttttccttacacctacaaacagtaaatgtacttgctggagcatrtgattcctgttttgggcttgtttccatttatatttagagagcaatactaggattaaaaacttttttattgttgttattattattttttgagacggagtctagctctgtcgcccaggctggagtgcagtggcgcgatctctgctcactgcaakctccgcctcccgggttcacgccattctcctacctcagcctccccagtagctkggactgtaggcgtgtgccaccacgcctggctaattttttgtatttttgtagtgayggggtttctccgtgttggccaggatggtctggactcctgtcctcgtgatccgcccgccttggcctcccaaagtgctgggattacaggcgtgagccaccgtgcccggccaatttttttgaggcagggtctcactctgtcttccaggctggagtgcagtggagggatctcagctcactgtagcctccccctcctgtgctcaagtgatcctcccacctcagccttccgagtagctggaattacagacctgcaccaccacacctggctattttttgtatacgttatagagacagggtgttgccatgttgcccaggctgatctcgaactcctggcctcaagcagtcctcccgcctcagcctcccaaagtgctgggattataggcgtgagctactgcacctggcctatgctaggattttatatagcattccatttgtgtacttgataatattctcccgaattctgtcacttttccattgtaatgtttagtggttacttttgataacggtaacagatacttttttaaaaaaccagatacttaagtaagtatctgtccgctgggctggagtgcactggcgcgatctccgcgtactgcaagctccgcctcctgggttcacgctattctcctgcctcagcttcccgagtagctgggactacaggcgcccrccaccacgcccggctaattttttgtattttttgttgagacggggtttcaccgtgttagccaggatggtctcgatctcctgacctcgtgatccacccaccacggcctcccaaagtgctgggattacaggcgtgacccaccgcgcccggccgagagtggtttctaaagtcctgtattattcttaattcttgagttcccagttgttggcattttgagagtatgtcacaatctttccatcagcatccagggaaagttcccttatggaacttttttctaataattccatcatcacagtagcagttagtgtcagtattctagtatgatagtctgagcagtattttggtaactctgtgagctactgttagtgagttggtgaggatgggtgaagttgaagaatgggaaaagaactgcttgctgtttaattcaccagcaggtatgttatttggtaattggtatcttgaagaagagaatcatcctggtcaagtttaaagactaaagttgcattttttttctccagagatgtccaggactgataattgttataataccctccctcctttttctccttttttacttcttcctcctgctgttatgttaaaagaacttagccacccaggaaaaagttagaggcggaagaaaaggctgaggtggattcacaggctctatagatagagaacagtgtagtgctgaaaaggttagagaggtcttttgttctgacaataatgaggtagtttgggatcttggatttctgaatatgacttggatgacacataaggagatgggtttcccccatttcacttacccaagtgtaggtagccccaacacagttaggtccttagccttgtgaattgttgaacaagtgttgtaaacccagaatttctgcttctacagaaatgtccttctttgcctaccagtattagcatttggatatgtaattcttgctcgactttttttgttacttaaccagaatgacagtctttcycctatcttccttctttattcttatcttctayctttccctcccaaactctttccccgacataacagaaaacatgaaggaattaaaggaggccaggccgcgcaaagataacaggcgtccagatctggaaatctataagcctggcctttctcggctaaggaacaagcccaaaatcaaggaaccccctgggagtgaggaattcaaagatgaaattgttaatgaccgagattgctctgctgttgaaaatggtacacagcccgttaaagatgtctgcaaggaactgaacaaccaagagcagaatggtcctatagacccagaaaataatcggggacaagaatcctttcctaggactgctggacaagaggatcgtagtctaaaaattatcaaaagaacaaagaaacccgacctgcagatctatcagcctggacgacgtttgcagactgttagcaaagaatccgccagtcgggtggaggaggaagaagtcctcaaccaggtagaacaactgagagtagaggaagatgagtgtaggggaaatgttgcgaaggaggaagttgcgaataaaccagacagggcygagatagaaaagagcccaggtggtgggagagtaggggctgcaaaaggagaaaaaggaaagaggatgggaaaaggggagggggtgagggaaacccacsacgacccrgcccgcgggaggccgggctccgcaaagcgctactcccgctcagacaaacgaaggaatcgctaccgcacgcgcagcaccagctcagctggcagcaacaacagcgctgagggagctggcctgacrgataatggatgtcgccgccgccgacaggataggaccaaggagaggccacsactgaagmagcaagtgtctgtgtcctcaaccgattccttagacgaggacagaattgatgagcctgatggattaggacccaggagaagttcagaraggaagagacatttagaaagaaactggtctggccgtggggagggtgagcagaaaamcagtgctaaagaatatcgaggcactcttcgtgtcactttcgatgcagaagccatgaacaaagagtctcccatggtgaggtcrgccagggatgatatggatagaggaaagcctgacaaaggcttgagcagtgggggcaaaggctctgagaagcaggagtccaaaaacccgaaacaagaacttcggggtcgtggtcgtggcattctgattttgcctgcccataccaccctatctgtcaattcagcaggttctccagagtccgcgcctttgggacctcggcttttgtttggatctggtagtaagggatctcggagttggggccgtggaggcaccacacgccgattgtgggacccaaacaatcctgatcagaaacctgctctaaagactcagacgccccagctacatttcttggacactgatgatgaagtcagccctacatcttggggtgactcacgccaggctcaggcatcttactataagtttcaaaactctgacaacccctattattacccccggacaccaggccctgcctcccagtatccctatacgggctataaccctctacagtacccagtgggccctacgaatggtgtgtacccagggccttactacccaggctacccgactccgtcaggacagtatgtgtgtagccctctacctaccagcaccatgagtcccgaggaggtagagcagcacatgaggarcctgcagcaacaggagctgcacaggcttctccgggtggctgacaaccaggaactgcagctcagcaacctgctctccagggaccgcatcagtccggagggcctggagaagatggcgcaactcaggtatgatgtggtctattctggctggagggaaatggggatcagccggaggtgtatagattgctatggctgaggaaggtagaaactttttagctgagccactgggtattatttccttttcacgttgtaagggaagggcagttggaaacagaacagaagttttatttctagtcttttttttttttttttttaagacggagtctcgctctgtcgcccaggctggagtgcagtggcacgatcttggctcactacaaactcygcctcctgggttcataccattctcctgcctcagcctcccaagtagctgggactacaggcgcctgccaccacacccggctaattttttgtatttttagagagacggagtttcaccatgttagccaggatgatctcgatctcctgacctcgtgatccgcctgcctcggcctcccaaagtgctgggattacaggcatgagccaccgcgcccrgccctatttctagtcttagaaataattatgcatcctactttttctttaagaaaaaattatctttaagggatcatggaatcttgaaatggaaaaagactttctagaatgccaagaaatgaacaacatgtaacttgcagtgaagatcttatttcagttgttaaatttaggtgaagacatatggggaaaaactattttcctagacacaactatctttagaatgacattctgctctgcagaatggaaaccagagtgartagtatacctacctggtcacattttttatttcctgysaggggaggtggttaatttgcaggaatctcaaaacttgagtctagctttttctgtggtgtatttggagctggaagttgcatgtattttattccagagctgaactgctgcagctatatgagcgctgtattctattagatattgagttctctgataatcagaatgtggatcagatcctgtggaagaatgctttctatcaggtgattgagaagttcaggcaacttgtcaaggatccgaatgttgagaacccagaacagattcggaacagacttttggagctcttggatgaggtaaactktcatctttttgtcctcaggataaaggcttcagcattctgtagttaygatggatttttactacctgaaatactatgttttagaacagaatatcgacaaaaaaactgcccttttcttgggttytgagccttccctacaccagttgcttccttgggaccataaattactggcaattggagttttgaggttgaaagctttctgaatgccttggcctaaaagagagagaatgagaatgtgtatgtatgtgtttgtgtttgtgtggagagagcgtgtgtgtgtrtgtgtgtgtgtgttcatgtgttcatatctttaaaaccatggaggctttgactgtgaatttgccttgttctcaaattggtggccagtgaatattgtgcgtgcctcccttttcataggatgtctgaacatcagcagaactgtgaaagggttgtctgccccggtttttggtggataggttggattagaatagattgattcagtcatttctttttttctttttatagggtagtgacttctttgatagtttgcttcagaagctgcaggttacttacaagttcaaactggaagactacatggatggtcttgccattcgcagcaagccattacgcaagacagtaagctaccttctttatgtatcttaaattttcattcatttcgtaagcgtttatctagtgttaggtatgtgctagacactgtactgggtgttgaggataaaakaatgatacagttcagtgcagggacagatagattaaaccaacaattgtaatgtcatatgtactatggtagtggtatatagcagtgctccccagccttttttctttctttctttcttttttttttttttttcattttttgagaaggagtttcattcatgtcacccaggctggagtgcagtggtttgatcttggctcactgtaaccttcaacctctgcctcccaggtttaagggattctcctctgtcagtctcccgagtagctggcgttacaggtgcccaccaccaagcctggctaatttttctatgttttgtagagacgggggtttcatcatgttgcccaggctggtctcgaacttctgaccttcggtgagccacccgcctcagcctcccaaagtgctgggattgcaggcatgagccaccgggcctggccagtccctagcctttttggcaccggggactagtttcatggaagacagtttttccatggacggagatgttggggcattagattctcatgaggagtgcatagcctaggtccctcgcatgcttagttcacaatagggtttgcgcacctgtgagaactaataccrctgctgatctgacaggagttagggttcaggtggtgatgcttgcctgcccaccgctcagaccagagactggtaccagtccgcggcctgggggytgggkacccctgatatagagtgttgaagggccatagggagaagtgaatctaacgtagcctggtggggccaaggaaggcttcttggagattgtcaagctgagttttgaaacatgactaggagtttgaaggtgggaggggcagtttagatagagggtccagcaaaagagaaccaggcattgttgggaaagtgcaagaacttcagtatgctggtgtttgtagtgtggagggggctattgtaggtggaaaagctaacaaagtgggaagcgactaggtcataaactctcatatgctatgccgaagagtttggacttcattctgaaagcactggggaaccattaattgattttttagtaaatggatraggtagatttgttcttagaaccagtcacttgggcaaattggtgagtttgaatgggagctgggcaagagtggagatagaggagtcaggttgtaggtctgaactaagatagaggtcgtggagatgggaaagagaagacagattggaaagaaagaaaggaaatagaatggaattgttgactgatttggtgtgagggatgagattggaggcatgaagagtctgaatcatctcccagctggtagtccaggggagtggctgcaaaggaaagagattggttcaggtttggatatgctgatgtggaggtgtgtgtgttacaggaacttgaaagtgaacaagtgaatattgtggtctctctggaggtcaggagaaagctgggctggtgatatagattcatgagtcatcatgatacaggtggtggttgaagcaaaagttggggtactgggaaggctggccagaaacgggggttacatttcaaggtgggggtaggtaaaattgtcaagtgcaatggagctgtcaaatgttaagattactaaaaagtgtccgttggattggatgaacttatcaagagttaatttagttggggaaactggaagccrgattgtagtgaagagagataaagcagtagagattgccagagagtaatatagaccattcttttaagcatcttggctgcgaagacaaggagggaagacagctaaaagaacatagggttctaagagaaggttttttgttctttgtttttcgttttttttgtctgtaccacgcctggccagtttttgttttaagattggaaagttgagcatatttaggaagcagttagagatgcattagggagagcagcgtgatttatggagcagaggcttcctcttgcctttttgctccttctactacatacacactttcttactgatggacagatgtttttggctgggcgcagtggctcactctttaatcccagccctttgggaggccaaggcaggcagatcacctgaggtcaggagtttgagaccagcctggcccaacatggcgaaaccccctctctactaaaaatacaaaaattagctgggtgtggtggtgcatgcctgtaatcccagctactcaggaggctgagacaggagaatcgcttaaaaaccagaaggcagtggttgcagtgagctaagactgcgttattgcactctagcctgggcaacaaagtgagactctatctcaaaaaaaaaaaaagtgtttattgagttcctcttacatgcttggtggtattttaggcagaggcaattcagtgcagattgaaaaaaaaccgtgctcctgtttcttggagtttagtgtttgattgctggtgagtacagactttggatgagtaattgctgatggagtgacttttgccaaggatgttgggggtgtatactgtaaagggttaacctagttttaaagaatcctgtgagactgagaaaatcatagttaaactaacgctgaaggccgaaagcttcagccaggtgaaggtgtatgtgtagatgcaaggagaggaacattttaggggaagaggacaatatacttaaaggccctgaagtggagaacaccgtggtgtgttaggggaactttggagtctggtctgactgaggtacagaaagtgaccgggaatatggtgctgatgaggtaagcagaggctcaatcgtccaggacttcatgctgaggctgacggagagcctttgaaagaatttgttttgttttgttttgtttttgtctcttaccaacatgacaaartggatgtagtatggaggcataatcagttctctttgtgctttatcagttaaatacagaggattcttaacacctttggggatgttcattcatagaatctgtggaacagttaggacttggggtatgtgatatgtagtsattataactttgctgaggtacaaatttgagttatgtgctaggtaggaggttaatgtgcagtagctatttcgcttagtgagtgtgccttcctgaggggtcagtatcttcttctcartgaagctttgttctttattcagtgatatgttaatttcttttgtgtggagtggagtggaattatattgtgtgctgtgaggtggtgttccctagggagatattttggggggcacatgccttgggattggtttactctgttttctgagtgacagatgccaagccaatcagtgagaaaacacatagtcctgcacagtgtgtggcaygttgttaatgtgtgataaaggacgatccattgttttaggtgaaggtaatgtaatgccgtggtacaattcagtgatgttaacagtttgaagaaagactataatgatggcaaaaaaagtgggtgggcgtgatggctcacgcctgtaatcccagcactttgggatgctgaggcaggcacatggatcacttgaggccaggagtttgagaccagcctgggcaacatggcgaaaccctgtctctattaaaaataaaaaaattagccaggcatggtggcgcatgccyatcatcccagttactcaggaggctgaggcacgagaatcacttgagctcaggaggtggaggttgcagtgagctgagatcrcgccactacactccagcctgggcaacagagtgagacgctgtctcagaaattattagggggaaaaaaaagaatagagtaaacaattgttttcatatttgtttgtctctttatagtttataaaatatttttacatttatttcctccagttaccctatagagtagttayttttacattcaggtgaagaaactgagtcccagagcatctcaaagacttccttgagatccaacactattccgtagagtcagatctcctgactactaatatcaaaatattttctttcatttgcctgggactcaagaatcaccctctctctttctcactaaattttgtatcacactgctgactgtttttttggtagtcaggtttaggctgaaaactttatagtttgttgtgtttttttggtagtcaggtttaggctaaaaactttatactttgttgaggaccgctagtgccttacgagtgctayattgtcattttcaccccatccctgtcctttgagggttgaagttagtgtttcttggcttttctactaactggttgtttttcctgaaggtaaaatatgccttgatcagtgcccagcgatgcatgatatgccaaggagatattgctaggtaccgggagcaagccagtgatacagcgaattatgggaaagcacgcaggtacttttacctctrcttcgttatttctcttccctatgtggctctaagctaagccttactaagagcagtaggccatrtgggtgttgtacaggtgtccctattggtccctgtagtcatgccttacccctccagggttacatctaacactctaccttatgttttaagtattagggctatcaggatgaattgggaaaaagctaatctggaactagcattttcttactgttttttctgttctagttggtacctgaaggcccagcacattgctcccaagaatgggcgcccctataaccagttggctttgctggcagtgtatacggtaagaaatcctgtggacaggggaaaagtgctttgcaggragtatcttacaatatggagtttgataatatcagttcctggrgcttcatttcatctcatcactgtagcccaaagaatatcccctcaaactccttttgttacggttactctcagaattaagttgtcagggattcctcacttcacttaactctgtacttcatctctccacttaccactgcactcaaattcctgagggaatgctcatgctccagctaaacaccattctttgtttctgaccagagctgccactctgaattttgtcttgattctcttccctttctgttgaactaggcaactcattctagacgaaaaataaggcttacttctctcccttaaagttttcacctacctctaagtagtcagatctttgcttcctttccctagaccctgttacttcttttaactttttatctgaggtgcctccttagcagaagcacagtaagcagcaggttgtacctccctaggtctaatcactgtgctctaaatatgtctgtaatggagaagcgggccttgggagctgagacagctcctagggagaaagctcaattcaagggggaaagtggggaccagtggtaggtaccagaggttccatcgtaagaaacaaataagatgctcattagcaaggagaaaattgtctctctctttttttttttttttttttttagagaggcagggtctcgctctgtcacccaggctggagtgcagtgacgcaaactactggcttaggtgatcctcctgcctcagcctcccaagaaaattcttaataattatggattgaaatagttgattaagtaatgtgctttactgaaacacttctttcaaaattggttgatctctctccggtttttgcctctgtctcattctccgtgatgggtttatgggattttttttcccgccctctttgcagcactattttttcttccctttttctctatatccgtcttttcctgattccttctttgtaatcgttgaatgaactgttaattagaaagtacaattaaccatcacctttatctagtgtcagaacattttcctttttttttttttctgagacggagtctcgctctgtcgctcaggctggagtgcagtggcgcgatctcggctcacggcaagctccgcctcccgggttcacgccattctcctgcctcagcctcccgagtagctgggactacaggcgcccgccaccacgcctggctaattttttatatttttagtagagacggggtttcatygtgttagccaggatggtctcgacctcctgacctcgtgatccgcccgcctcggcctcccaaagtgctgggattacaggcgtgagccaccgcacctggccatgtgtcagaacattttcatcaccccaaaggagacctgatacttacgctttccatccctgcctcccctcagcccctgacaaccactagtctgatttctgtctctgtatctttacctgttctggatgtctcacataaatgggatcatataatgtatgactttttgcagttctctaatgacacacgatgttgagcgtcttttcatatgcttgccatctacatatcttattcagtgaggtgttcagatcttttggcccccccactacttttttgcccatttttaaaattgagttttttcccttatttaagagttctttrtatattttggttacaagtcctttatcaggtgtgtgatttgcatctattttcttccagactgtggcttgtcttcacattcttcagcagtgtcttttgcagagcagaagttttaaattttagtgaaatccatcttaccagttatttctttcatgggttatgcttctggtgttttatttaagaagttgtcttcacacccacggctagcttaatgttgtgttattttctagcagttgtatagttttatgttttacatttaagtctgtaatacattttgagttaatttttgtgaaaagtgtaaggctcgtgtatagatttattgatgcaggtggatatacagttgttctagcaccatttgttgaaatgactgtccttttaccatcgaattgcctttgctcctttgtcaaagaccagctgactatatttgcataagtttatttctggcctctctgttcatctatttctctgttctttggtcagtaccacactgtcttggttcctgtaactttatttatgtcttgaagttcagtagtgtcagtcttccacctttgtttttcagtattgtattggctattctggatcttttgccttcccatgtaaactttagaatcactttgttggtatccacaaacctagtgagtattaagtgataactcattgtggttttttattggattctcctagcaactaatgatgtgcatcttttcatgtgctgatttgctattgggagaaatatctatttcattgctcattgagaaaaattttaattacatatatatatatatatatatatgtataaaataataattatttttttttgagatggagcctcgctttgttgcgcaggccggagtgcagcgctgcagtagtctcggcttactgtaacctccgcctcctgggttcaagctattctcctgcctcagcctccagggtagctgggattacaggtgcacaccaccagcccctgctaatttttttgtatttttagtagagatggggtttcaccatgttggccaggctggtcttgaacttgtgacctcaagtgatccacctacctcagcctcacactggrattatatgcgtgagccaccgcacctggcagttttaaaattttaattgtaaaatactcatagaatttatcctcttacccacatatatatgtgtgtatatatatttaagagataggatcgcactctgtcacctaggctggagtgcagtgacacaatcatagctcactgcagtctcgacctcctgggctcaagtgatcctcctgccttagmctcctgattagctgggactacaggcactcaccatcatacccaggtaatattttgattttttgtatagacaggatctcactccgttgcccaggcaggtcttggaactcctggcctcaagtgatcctcttgcgttggcctcccaaactgctgagattacaggcatgagtcactgctcccagtcacttaattttttttttctttttttgaggcagggtctcactttgtcacccaggctggaatacagtggcatgacctcagctcactgcagcctcaacctcccaggttcaagctattcttctgcctcagccccccaaatagatgcaactacaggtgcccgccaccacagctggctaattttttttttttttttttttttgagacagagtcttgctctgttgcccaggctggagtgcagtggcgmaatctcggctcactgcgagctccacctcccgggttcacgccattctcctgcctcagcctcccgagtagctgggactacaggcgccctccaccacacccggctaattttttgtatttttagtagagayggggtttcactgtgttagccaggatggtctcaatctcctgacctcgtgatccgcccacctcagcctcccaaagtgctgggattacaggcrtgagccaccgcgcctggctgctcacgcctggctaatttttgtattttttgtagagacgggatttcgccatgttatccaggctggtcttgaactcctgagctcctaagtgatctgcccacctcagcctctcaaagtgctaggatacaggtgtgagccaccagccctgcctatcttacccactttttttttttttttaattgagagaaggtctctgtcacccaggctggagtgcagtggcctaatcttggctcactgcaacctctgcctcccaggctcaagtgatcctcctaccccagcctcccaagtagctgggaccacaggcgcatgccaccccacttggctaaattttttgtatttttagtagagatttggtttcactatgttgctcaggctggtcttgaactcctgacttcaagctagccacctgcckcagcctcccaaagtgctgggattacaggcatgagccaccactcccgggctgtcttgctctttttcttttttttgtgatggagtctcgctctgtggcccaggctggagtgcagtggcacgatcttggctcactgtaacctccacctcccgggttcaagtgattctcctttctcagcttcctgagtagctgggaccacaggcttataccaccacgcctggctaatttttgtatttttaatgcagatggggtttcgccatgttggccaggctggtctcgaactccagacttcaggtgatccacccaccttggcctccgaaagtgctgggattacaggcgtgagccaccatgccctgcctgtcttacccatttttaagtgtagcttcagtagcattacgtacattcatattgtagtgtaacgaayctccagaatgcttttcattttacaaaactggaactccatatctattaaataacagctcccacttctctcttcccacaacctctgcaactaaccttctgctttctgtcactatgaatttggctactctaggtacctcatataagtggaattatacagtatttgtcctcttgtgactggcttatttcacttagcttaggtcctcaaggttcatccatgttgtagcatgtgtcagaatttcctccttttggagggtgaattayatttcattgtgtatatataccacattttatatgtacgttcacccattgatggatacttggattgcttccatctgttggctattgtgaataatgccacagtgaacatgggtgttcaaataaaatctcttcaagaccctgcttccaattcttctgggtacatacccagaaaacgaattactagatcatttggtaattctgattttaggtttttagaacaaccatattgttttccrtagcagctacaccattttacattccaaccaacagcatgcaaggcttctgatttctccacttccttgccaacacttgttattttctgcatttctgatagtagccatcgtagtggtggtgaggtgatatcacattatggttttaatttatgtttccctaatgatgagcattttttcatatgcacattggtcatttgcatatcatctttggagaaatgtctattcaagtcctttgtccatttaaaaattgttattttagccgggcccagtggctcacgcctgtaatcccagcactttgggaggccgaggcgggcggatcacgaggtcaagagattgagaccacgatgaaaccccgtctctactaaaaatacaaaaaattagccaggcgcagtggcaggcgcctgtagtcccagctactgggaaggctgaggcaggagaatggcgtgaacccgagaggcggagcttgcagtgagccaagatcacgccactgcactccagcctgagcgacagagcgagactctgtctcaaaaaaaaaaaaaaaaaaaaaaaaaattattttatgttttgtgttgtcaagatgtatgagttctttatatattctggatgctagacctttattagatacataatttgcaaacattttcttccattttgtggattgtcttttcattctgctgagaatatctttcgatgcacaagtgttttttaattttgctgaagtccagtttatctttttttcttttgttcctttcactttcgatgtcatagctatgaaaccattaccaaatccaaggtttggaaaatttacctctacgttttcttcttagagttttagacttttacctcttatatttaggcctttgattaattttaggtgaatttttatatatagtatgaggtaaaggtccaacttcattcttttacatgtggttattacattctctcagcaccatttgttgaagagactgctctttcttcattgaatggtcttggttcccttgtaaaaagtcactttatatgtgggttttttctgagctctcagttttcttccattgatttatatgtcagtcctcatgccagtaccacagctgtgttagttactgtaggtttgtggtaagaaaaattgggaaatgtgagtcccctaacttcgttttttttttttttttttggccatttgaggtcccttgtaattatgtatggattttagggtcagctttttcatttttgcaaaatcattggaattttgataaggttgcactgaatctgtagattgctttgggaagtattgccatcttcaaaatattaagccttctaattcatgaacacagggtgtcttttcatttacttcgttctttaatttcttttaaccctgtgtataataagttttgcacttccttggttaaatgtattcctaagtatgtcattctttttgatgcttttgcaaagggaattgttttcttttttttctctgtctttctctctatttttttagacagggtcttggccaggtggggtgtctgacccctgtaatcccagcactttgggaggctgaggcaggcggatcacttgaggtcatgagttccagaccagcctggctaacttggtgaaaccccatctctactaaaaatataaaaattagccaggtgtggcagcacacacctgtagtcccagctactcgggaggctgaggcgggagaattgctcaaatccgggaggtggagtttgcagtgagctgagatcatgccactgcactccagcctggatgacagagcgagacttcgtctcaaaaaagaaaaaaaaaaagaaaagagggtctcactgcgttgccaaggctggtcctgaactcctggcttcaagtgagcctcctccctctgcctcctaaagtgctgggattataagcctgagccattgggcctagccagaaattgttttcttaatttcttttttttcagattgctcattgctagtatatagaaatgtaactgaatttcgtgtgttgatcttgtatgttgcaactgtgctgaattccctcaatggctttttgtcatttgaattaaattttctttttcacagacctctgacctagattcgcactttcttcaagttcttttcctctatccctcttttttctrtctgtctcatcttagttgtctgttagcaacattttcccaacttttctgccaattccaatcagtcagtcattctgtctcttccaatcagtgaatctcaggtatttattgagaacacaacacgtgtacagtagtgcttttctaggtgccaggaatgataaaatattgacttgctttcttccctgaaaaaaaaaatgtgttgagaaaacaagtgagctgtatagacagtgatgcaaattagacttgataaatatgtaattgattgttagatgcaccattatcttctgttccactaagaaaaatgctgcaaattaaaataagacataacaatagataccgattgtaagttgtatctctgttttggaaattttttcatatgaaaaaatattttatagaattaatataatacagtctcaaatcaggtgagtagtgtagatagaaattagtatggattggaataataataaaaatagctaccaagtaactgtaatggtgtgccaaatattctgttaaactatatgcattatataattttaatctttttgggagccatatgttgtaaacatttccattttgcaaataaggaaacctctctaggttaacgtgctgtgtcatacctaataaatgcaagaccgaattcagactcaggcactgaccttagaacctgcacctctagccatgccaggtgaatataagataggagttttgaagaatgggtagacgctggggagagagagaagctagcattttaaatgtattttgaaacagttatggaaaacattgaaaatgtacatgaagttggagaaaaagtgagaaagccttttggatattctttctgcctttgtttcaatgttttcctttttccttctttctgacccacttcctttttctttacttcttcttttccctattaattgcttataaatagacttgctgaatttcttgaataatatccataaaatgttcaactcagctacttatttattttaaaaaattatcaataacaatggcaacatcattgattaagtacagttaagtgtgagacagtggacaacactttgtaaacctgaggatactcctccattgggtattattactcccattgtaatgttgaggatataggaactcaggaagattattacataataatgtaataatcttggagtcttttgtccaaagtttccragtcaactcctggattagccagtatttggaccaaggtctgtctggcttgtaatttygtgatttcattatagcatactgactctctgataagaacaggaaatataaagtgaattgaacatcatgctttttctaagaacaagatgtaatttctgtttatattttaagagcctgtttattcctttctctccttatgagtacttggttcttggagcacctctgcatgtaagatataatactgtgcaagaagagatctgtgatgtaattgcaatggcttctcctgtggatagcatttctgattttgttgttgggattcctctcagtttgggagacaggctgggagagatagtagggtttcctgagtcagctgcctcttgctggagttaggacgagaattggttgactgaatgtctctggcctctttccacagaggaggaagcttgacgctgtctattactatatgcgcagtttagctgccagcaaccctatcctgactgccaaggagagtctcatgagcttgtttgaagagaccaagcggaaggtgagtggggatgtggcagaacccttccttcctcgaatagtgcatttccctgagtgttggtgtgccctagctctgcgcaccggcaggatcgtagccagtgaggtttatccaaggtgcagttattgctcagtgtctgtgtgtcctcggggaatgactcatagtgtccttaaatggtcccatcagactgtgctggtgggtagttggtcagcccctgtgcagaacaaaactgtgatcttcaggagagctttcaggggcccttggatgtacatgtacgtgctctacagccttcagtctacagaattaataactatatgaaacaaagcagatgacactctgctactttgggactgtggtacagtatttttattgtcaaataaataccggtgaggtgaggcttttctctttgtaagctgagtctcaggaaagtctgagctcatgtgtgttttttgtttttgagacagagyttcgctcttgttgcccagactggagtgcagtgatgcgatcttggctcactgcaacctctgcctcccggatttaagtgattctcatgcctcagcctcccgagtagctaggattacagatatgcgccaccacacccagctaattttgtatttttagtagagacagggtttcactatgttggtcaggctggtctcaaactcctgacctcaagtgatccgcctgcctccgcatctctaagtgctgggattacaggcgtgagccaccacaccaggccatgagctaatgtgtttgtatgttatataggcagaacagatggaaaagaagcaacatgaggaatttgacctgagccctgaccartggcggaaaggaaagaagtctactttccggcatgttggagatgacaccactcgcctggagatctggattcatccatcccatccacggtcttcccagggcactgagtctgggaaggattctgagcaagagaatgggctgggcagcctgagtcccagtgatgtaagttcctgagaatgatgcaatgagccaaactagctcagtaagcctgggtgccctggttcatacagctgtgaggcacagatacttcccactgattgcaaggaagacaaaccacttgaggctccctgatggtcttttcccttctcatgtacgcttcctttatctttattatgtacttccctctctcaccactatgtgtcactgcagaatttagtaaaagtaggattagaatttttttttttttttttttttttwtgctgctttttgttcagcgtcatcaacatgatgctttaggattctatgtgggattttgtacttatcttttcctcttggttgaccttatattccgagaatgaactaaagtagcatggataggttagttagtctgatttgtgatgggctttctatgggatatcctcttataactcttgggcggggactttttcctttaagccaggagaaatgacagtagaaaaatcacaggcttgtttagaagatttctcctcttcattgactcagtaagtaattatcgacagtgtgccagtcactaaagataacagtgaacaagatctcttgctgtctcagtgcattctagtggaggacgcaagagacttaacattgtaattacttctgtttttggggtgcacacccagtatatgagagcacatagccatgggaccaaagcagccattggtcaattgaagtataaagaacaagtaggagttagcttgagaaggaaagggaggtggtaaagtgattcccaggcaaaggaaatagcatatgcaaagggctgaggctggctgggggagagagagcacggtaggtggaaaactgcagtggctggttcgttgcgccttaagggtaaaattcacccagtgggtggtgtaagctggggctagatgttgaagggtcatatgataaattatttgacctttatcctgaaaatagtaggaagctattggatgctttaaataggggaataacatctgctcttcagaaataaaccctggccgctttgtaaaatgtttggagaagagtaagactagaaataggagacaaggagggtgctgcggtagttccaagtgagatatgaaaaagacttgaaccaagaaatggctttggaggtgggaagaagtgaacagacacaagtcatattattacagtagaatccaaaagacttggttgaacgtggggagctcagggagaagaaagagtcaaggtctggtgtggtggctcccatctgtaatcccagcactttgggaggccaaggcaggaggttcgctggagcctaggaattcagtaccagcctggtcaacaaaacgaggcttctgtctctgtaaaaaaattttcaaaattggctgggcatggtgatgcgggcctctagtyctagctactcaggagtctgaggcaggaggattgcttgagtccaggagttcaaggatgtcatgagctatgatccagcgtaggtgccagagcaagaccctgtctcaaaaaagtcaagaatgagcccaagagcgtcaaggctgcaccactgcactgcagcctgagtgatgagtgagactctgccttccaaaaaataaatgaatacaatcaaaaacagggtcggtctctgttgctcaggccagagtgcagtgatgcgatcgaaatcctgagttccagtgattttcctgcctcagcctcctgagttgctaggactacaggcacatgccaccacacccagctaattttttgtagcgatggagacttgccctgttgcgcaggctggtctcaaactcctggcctcaagcagtcctcccgtggcctcccaaagatctgggattacaggcatgaggtgtatcatgtctgtcccattttatttctaattatacaaataatagatgaatatatttttggtaaaaactttaaattcttgtaggtagactacaacgtggtaatttgttttctaaactattgatgaaactatatatttttagtttgtacatcatccttgggtaactattacccttaattttctttaaatttaaatctttgagtttgagcttttcattttaggctaccagccctcgaagaaatctgcagtttctggcctgacgcggtggcttacgcctgtaatcccagcactttaggaggccgaggcgagcagatcacaaggtcagragttcgagaccagcctggccaacatggtgaaaccctgtctctactaaaaatgcaaaaaaattagctgggcgtggcagcgcactcctgtaatcccagctactcgggaggctgaggcaggagagttgcttgaacccgggaggcggaggttgcagtgagccgagatcgtgccactgcactccagcctgggcaaagaagccagactttgtctcaaaaaaaaaagaaaaagaaatctgcagtttcataacttttcatttatctatccaggaaaccacactgccatttttacctgctttcttaggcccaagttagcttcctatattcttttttttctctcacagtaggtcccaagagcttagcttgctttctctgttccttggaacacacacattgataagaagtaagcattgaggatagagaaattaaaataaccaaaaatgatttttaacctcaaagagcacttggtcacgtgaggaagacataggtgtgtcattatagttccgtgtggtaagtactgtgataaaggcaagcatgagaggccgtgggagcatgcagttggaacacctaatccagtcatggttagggaaggctggggcgaggccgcattttgcagcttaaagatgtcgtaaaggcatttctacttggaggcatgaaaatgtggatgaggcatggaggcttcaggaactgcgagtagttcagtatggctggagtctagagtgtgagaagttctcctgtgagcgactggagtcgtgcttgacatgttcctttcctctgtccccacatccagtcagtaccacctggtattaggaggtggatactgttgagtccacctcctaatcgtaacttgaagccatccacttctctcctttctcattgctgccatcgtagttcaagctatcaccatttcagtaatccatatactatggaaagaagttcataatggtcttttcagatttattcctggtcctcttctggcctttcattttagacagtaacccaaatgaatgaacttccaaatatccatttctgatcatgccactgccttcttgaaagtgtttagttatttctgtgtgctcttacaatcaggtctaaaatcctcgacatagtccactaggctcctcatgatctggctcctgctacttcaaatcttacacttttcatacttttcttcctttgttactgtattccagccacactggcttcttccttgaaggatccaagctcttttctggctcctggctgttgttcatctctctgcccgcaccgctcttacctctcactggtatttctgcctttatcagtcactttctttcttacccttcaggtctcagcctaaatgtcacgttttcaaggaagcgtttcctgatccctgagactggccatttcgcctttgtaataaccacatttctggtttaagtgcttttaagtgtagttttgtgcagatctttcccttgctagattgaaggccctgtgagagtagagtcatatctagtgtgttcacttctttgtccccagtgtctgcatatggaagattctaaataaatcttagttgatacgcgaatgaggggaagggcagcgagggatgaggctagagaagatagcaggggccaggtccttcataaatattttgaagtttggctgtcaggtattgagggcttttaatttttttggagttgtgttggtcatgtttaaaaattgatatataataattgtacatatttatgggctacatgtgatatttttatacgtgcacagaatgtgtaatgatcaaatcggtatttagaatgtctgtcacgtcaaacattagtcatttaggtactaaggattttaagcagagggatgatataattggatttctataatgatcactcgttccaatacttccagtactggaacaaatttattttgttttaaaaggaacttttcaagttgcataactaataacaattcattgtctcaacattaaacagtaatgtatatatagtttaggctgggtacggtggctcacgcttgtaatgccagcactttgggaggccgaagcgggccaatcacctgaggtcaggagtttgagaccagcctggccaacatggtgaaaccccatctgtactaaaaatacaaaaaagttaccygggcatagtggtgtctgcctgtaatcccagctactcgggaggctgaggcaagagaatcgcttgaacycgggaggcggaggttgcagtgagccaagattgcaccattgcactccagcctgggcgacagagggagactttgtctcaaaaaaaaaaaaaaagtatatataaagtggcagtcacttgtattctttccttcggagacatcactattaactgattgatgtccttccagacctttttctaagcatttataagtgtatacgtgtatgcacatacctgtaaaaacatgaaatgcattataaaatttttttttgagagataggatctccctctgtttcccaggctggggtgcggtggcatggtcacggcccactggagcctctatttcctgggctcaagtgatcctcctgccttagtcttctgagtagctgggactgcaagcatgcgccaccatgcctggctaattttttaagaatgttttgtagagatgggatttccttatgttgcttaggctggtctcaaacttttaggctcaagtgatcctcccacctttgcctcacaaaatgtttggattataggtgtgagccaccaagcctggctgaaatacattttttaacaaaaaggaggatagtactatgtataacaatctgcaacttactttttaaaattattatttgaacataaattaytcctgctataatgcaatatatacattcctaaaaattgctgtgctgtgcaaaatcatgcaataaaaaccacacagggcttatgcagaaaatggagttaggagcacaaacctcaaaaactttctcagtgacatagtgaaaaagatargagcctgatttaaaactgttgtacaattttatacatgtgaaatggttaagaaatacgtaaatatggccgggcgtggtgcttacgcctgtaatcccagctctttargaggccaacgcgggcggatcacgaggtcaggagatcgagaccatcctggctaacacggtgaaacctygtctctactaaaaatacaaaaagttagccgggcatggtggcaggcacctgtagtcccagctactcgggaggctgaggcaggagaatggcgtgaacccgggaggcggagcttgcagtgagccgagatcgcgccactgcactccagcctgggtgacagcgagactctgtctcaaaaaaaaaaaaaataaaaaataaataaataaataaataaataaataaataaatgtgtaaatactacattaaacatagcactttaccttgaaaaagacataaagtaggccgggcgcagtggctcatgcctgtaatcccaacactttgggaggctgaggcaggcggatcacttgaggttgggagttcgagaccaggctgactaacatggagaaaccccatctctactaaaaatacaaaattagccaggcgtggtggcgcatgcctgtaatcccagctactcaagaggctgaggcaggagaatcacttgaacccgggaggtggaggttgcggtgagccgagattgtgccattgcactccagcctggacaataagagggaaactccatctcaaaaaaacaaaaagacatacagttggcatgtggaagtggacttgggaagggttacggcttgtgagttactgtgaagtggtagaaggagggttacttaaaatttgatggacagaggccaggtgcagtggcttacgcctgtaatcccagcactttgggagaccgaggtgggtggatcacctgaggttggaagttcgagacaagcctgaccaacatagtgaaaccctgtctctactaaaaacacaaaaaataagctgggtgtgatgacgtatgcctgtaatcccagctactctggaggctgaggcgggagaatcacttgaacctggaaaatggaagttgtagtgagccaagatcgcaccattgcactccagcctgggcaacgagcaaaactcaaaaacaaaaaaaaaacgtttgctggacagttgtaacagcagatgtggataggcctggctcctaacatgatcctgtggtgaactggggtagctgtagatgtttggggtgtgtgcgtgtgtatgctttgtgtattcctgtgcagcttgattcaactggatgcagttctctgtgttacctggtgtttcttgtaaacaaaatcacacataaggaaaggcaaagtttgtgttatgcccaaattgttcgtttatgtatttatggcaatgaaacaaattctcattttcaaaatgaacattatagcagaactgggtgattagccttaattggaattgttcctttgacaactcctagagaatttctaatacagactgcttaaatttagatccatgagtaaacagaaagtttggcttcaggtggttgttagtaacagtggtaacatcccaactagtctgttctctgccaagcatttgctttggatctttctctctctgaatggttgcaggaggttagcttgtgggttgttggtttttagtcttgagatgtggtttgggttgaacatccagcctggggagggattgccagcctcaactgcaagtagcatcctattgagattcacatttcaactcttccacctgccagccaggaccctccaaatccacgttgccagggttctgggcatttgttatttagtggctatatcttctgctgttcttcgtctccctttagaaacggggtactgcttgtcaactgggttgttgctgacagtcagggagttaaggatattaaattacagcatcagaaatcattttcacactgaaaagcaagggtctctgatagaactgctgaggattttttagatctgattgttttgttatcagcatcttgaatagaatgtaatacatgtctgtctgctggggaagaaagcatataggattgggagtggttgatagatgatagactgatagacttattttaattttgttttgttttgtgacagagtctcgctctgtctcccaggctggagtgcagcggcgtgatctcagctcactgcagccgccacctcctgagttcaagtgatcttccagcctcagcctcctgagtgactgggattacaggcacgcaccaccatgcccagctgatttttgtattgttagtagagatggggtttcaccatgttggccaggctggtattgaactcctgacctcaagtgatccacccaccttggcctgccaaagtgctgggatgacaggcgtcagccaccatgcccggctcgtattctttatatatgtaggaaggagcacaacccttaaaacacttcctcagtgacataattaaaaagataggaacctacataattaggtttctaccttttttatgctcacgcctatttttttttttttttttgcccatgcttttttatgcttattccatccattatgctttgctaaatatgtggagataaggtcttgctatgttgcctgggatggtctcaaactcctaggctcaagcagtcctcccacctcagccttccaaagtgttaggaatacaggtctgagccactgcatgtggccaataggtgtttgtctctgaaacttgagtgagtcttcctgccstggaatgatttggtttaccattgccagcattttctccaagccactgtgactattcctgcaacatgcttggtgctgattgtagcaaataatgtctttagacaagagaaatgccattgtatatttggccaagctcttgtcaaaccttccttctccttggcctctttgaatgttttgtggttcagtctggactgtaccatagaagctcctaatctctgttatccaaatagaatgtaatacgtgtctgtctgttttcctttttctctatcttcacccaacaaatgattttgtttaccttgttctctctccttttgctcttcttccttctgttacatatcattatctattttatttatttgcataatgtcttttttcaggacttgttcaggtctggagaatttaatgcagttgcccctgagtttttggagtagaagaccatgttctgggctcagtgcttaagtagactaaagtttacctgttctgttgtgccagttttgtgctaggattgtaaagatgaatacactattgttactttctctgattgtgtagtctagtgtataggtcagcaaactttttctatgaagggccagatagtaaattactttataggscatatgttctttgttgccaccactcacctttactgttgtaccaccaaagtagccatggacaatatgtaaatgaatgagcatgactgtattccattaaaactttatttacaaagacagatggtggattgaatttggcctgtgggcctagtttgccaacttctgttccagtggaagaaatggttacataaatagaatacagtaaacagttgattcttgttatttgtggtggttatgttctatacattcaataaattcaccacaaacactgaattagtgaatagtggattgttgctcctaagggaaatacagaattacattccttcaagcctctgatcacaacattttaatcaactggtcaatatataaccttgctttttttgggtttttttttttgagacacagtctcactctgttgcccagggtggagtgcagtggcgcgatctctgctcactgcaacctctgcctcccaggctcaagcgattcttgtgccttagcctcctgagtggctgggattataggygtgcgcctggctaatatttatttatttatttgtttttgagacaaagtctcacactgttgcccgggctggagtgcaatggcacaatctctgctcgctgcaacttccgcctccccggttcaaacgattctcctgcctcagcctcccgtgtagctgggactacaggcacccgccaccatgcctggctaatttgtgtattttggccaggctggcctcaatctcctgacctcgtgatccacccgcctcggcctcccaaagtgctgggattacaggcgtgagccactgtccccagccacgcctggctaatttttatattttgagtagagccagggtgtctctgtgttgtccaggcaggtcgtgaactcctgaccttaagtgatccgcccacctcagccttccaaattgctgggattacaggcatgagccaccacaccygacyagttatataaccttgttttatgtgggtttctgtttaaagacaccttatttaatatatattattaattcattaacagagagctcactgcctaacagcactataactcatagctgaatgaggcttatctaatacacattttccctgtaaaacacatcacagccttcttgcacttagggagtcacacacttcggcacactccccaagcacagtggtgtgggggccacgtgagacaacaaaatcaccaacaaaaatctcagaaatgtgatactaaatacaccatgaaaaggacactttttttttttttgagacagagtttctctctgtcccccatgctggagtgcagtggcgtgaactcagctcctccgcctcctgggttcacgccattctcctgcctcagcctcccgagtagctgggactacaggcgcccaccaccacacccggctaatttttagtatttttagtagagatggggtttcaccgtgttagccaagatggtctcgatttcttgacctcatgatccgcctgcctcggcctcccaaagttctgggattacaggcatgagccaccgtgcccggccaaggacacttctaagtatgacctgaaatacgaaggcagagagttgctttttctgaccttagttagctaggaacatgcacctcaggtgactcaaattttgtgctgctctgtgcatgtctaggaatgactgtgaaagcatcatgagtagtgatttgggggttacaagtaagttttagcaagtaartgaattcacaatgcaaaatccatgaacaatgaaggttgattgtattgtggtgggtgccaggagggaggtatgtattgggtactgtggaagcacagagagaggctcttggtccagccctggcagaggcatggtttggggtgaggagagaggaaagtgaattcagaaggcttcctggaaaagttaactgggcagagtgggaagagagtgttccaaatagaagtaatagcatgagcaaagacagagaaggtgtgaaacagcagagggctcacagggcacctaaatctgtggtaatttggaggccaatgtgagaaagttggagggtagagaggaggctgagccttctgccagagccacattctagtttggtgccatggtgtgcacttgggaggtagtcagggggctgatctcccataagataccttaggattctggaaataataatttgtttctggaatttctcactgtttacttgtcatgtctgcattgttaattgagcaaaagcagcactattctatccattaaatttggtagggtggagattgactgaatcttttaccscacagtttgctgacttaaaaagttgaagggctattcttttagacaatgcacttaggcattttgaactcaaacatgctagtgtctctctgtgtcttggtagttggaggaaattgccagtggtttgggttaagtagggcaaagccttttttctttttaattaaaaaaaatttacagctttttatttttatttttattttttttgagacggagtcttgctctgtttcctaggctggagtgcaatggtatgatctcggctcactgcaatctctgcctcctgggattaagcgattctcccgcctcagcctcctgagtagctgggactacaggcgcccgccatcatgcccagctaatttttgtagtttttaggagagacggggtttcaccrtgttggccaggctggtctcgaactcctgacctcaggtgatccacccacctyggcctttcaaagtgctrggattacaggcatgagccaccatgcctggctgctttttaaaatgtataggctggtttcaaactcctggacttggctgggcatggtggctcacacctgtaatcccagcactttgggagtctgaggcaggcaggttatttgagatcaggagtccaagaccagcctggccaacatggcgaaaccccgtctctactaaaaatacaaaaattagccgggcatagtggtgcatgcctgtaattccagctactcgggatgctgggaggcagaggttgtagtgagccaagattgcaccactgcactccagcctgggttgtggagtgagactgtctcaaaaaaaaaaaaaaaaaaccagaaaaaaacagaagaacaatttcctggactcaagcaatcctcctgcttcaacctcccaaagtgctgggatacaggtgtgagctaccacgcctggccttatttttctgttttatcaaagtaacacaattaaagttacamctgtaggcctttcctcctgtgtgtagagagaaacttctcaagccacatgaatagagcatagagagttcaagaaatgttaggcatctgatagaccaattattgtttcgaaagattgagtctgaaaatgcccatttcgtaaggaagcatcttgaactagtgacaccttggggaatggggcattaatttgacgccccctgggcatggaaagttgatgaccttgtttcaaaggctggggtgtagttggaaaagtgcctaggctgtaatgccggagttggtttctaagttagtgggaatagaggttgaaagagatcacacagaggagtgattgccttttaaagtattttagytgaagaattttttttttccttgagacatggttcctctctgttgtgcaggctggagtgcagcagcatgatcatcgctcactgaagcctccatctcccaggctcaagtggtcttcctgcctcagcctcctgagtagctgggactacaggcatgtgccaccatgcctggccaatgttttttatttttcatagaggaagggtctcgctgtgttgctgagactggtctcaaactgagctcaagtgatcctcccacctcagcctcccaaagtgctaggattacaagcataaaccactacacctggactctaaagaactattttcagtaggtcatatattatgtaggtgtatatgtgattatttttcttctcttgcattattagtggcatattatacacactggtatattcacctttttttttccctattrcyactggacttcggagatccttctctgagtaattgccctcaaatccattgtatctctctagagcctggctgatagccttcataattttgtctagtatttgtatgtcagagccaggatagtgcagagctttggaaagtcctgagttcaagtgctagtttttttgtttttttcgttttgagacagagtctcactctgtcgcccaggctggagcataggggcgccatcatagctcactgcagtctcaaactcctgggctcaagccatcctcttgccttgacctcccaaagcactaggattacaggcgtgagccaccaygcctggcctgaagtcctacttttatcagatattagctgcgagactttgggcatgttctgtaacctggctgagctttagttttctatctgtaagatgatgacagtgataaccttgtttcccyagggctggagctcatagtttctgcttggaattttgcatgctgcctcttcccaaatctctcgtgattttcttagaggtgctattgaaagttgagaaggacagttttctttctgagttggaatacgtggctacacaaagttggatagtatattttctttttgcatttaatcagtagaccagcaaagtgaaagttggttagcaaaggagcatggcttccctgtggaaaacccaggccaggtggcctgtagcacagaacgttcaccacatgctcaacttgttgtatttgcttgagggctattttttttttttwaatgtatagttttttgttttgaaagtgtgttatgtaggtggcattttcttttctttcttttttttttgggacagagtctcatgctgtcaccctgggctggagtgcagcggcacgatctcggctcattgcaaccttcgcctcccaggttcaagtgattctcatgcctcagcctgccaagtagctgggattacaggcacctaccactgcacccggctaattttttttttttttttttttttgagatggagtctggctctgtcgcccaggctggagtgcagtgctgcgatctcggctcactgcaagctccgcctcccaggttcaaaccattctcctgccscagcctctcgggtagctgggactatgagtagctgggactacaggcgcctgccaacatgcccagctaattttttgtatttttagtagagacggggtttcaccatgttagccaggatggtctcgatctccttacctcgtgatctgcccgcctcrgcctcccaaagtgctgggattacaggcgtgagccaccgtgcctgatcgttttttttttgagacgaagtctaactctgtcgcccaggctggagtgcactggcgtgatctcagctcactgccaggtctgtctcccgggttcatgccattctcctgcctcagcctcccaagtagctgggactacaggtgccygccaccatgcccggctaatttttttgtatttttagtagagatggggtttcaccatattagccaggatggtctcgatctccttaccttgtgatccgcccacctcggcctcccgaagtgctgggattataagcgtgagccaccgctcccggcctaatttttgtatttttttaagtagcgatggggttttaccatgttgaccaggctggtttcaaactcctgacctctagtgatctgcccacttcggcctcccaaagtgttgggattacaggcatgagtcactgctccccacccaatattttctttagactcatcatttgtcttttcagtgccccttgcgtagtttgtgcacctgagctgctgctgctgtgaaagctgctgtgtatgagtggtacacatctaattcctccaccctccccgcaaaacaattatagatcagagcatggttttataaggtttccttagacaaggtgacttgctttctgttggaatgagttctaattcctagagttgtatcatgaggctttaggtttatagtttgagagccagtacccattatgaagcttagaaaaagcttttagactggacacagtagcacatgcctataatcccagcattttgggaggctgaggtgggaaattgcatgaacccaggagttggagaccagcctaggcaacataatgagatgccgtctctaataataataaaaatatttcacttaaaaaatacataaataaggctgggtgcagtggctcacgcctgtaatcccagcactttgggaggccaaggcaggcggatcccgaggtcaggagatcgagactaccctggctaacacggtgaaaccccgtctctactaaaaatacaaaaaattagccgggtgkggtggcaggcgcctgtagtcccatctactcgggaggttgaggcaggagaatggtttgaacctgtgaggtggagcttacagtgagccgagatcgcgccacggcactccagcctgggcaacagagcgagactctgtctcaaaaaaaaaaaaaataataataaaaataattaaaaatacataaataagtaaatacattaaaaaagaaagcttttggcctggttctctctggatagcacaagcactgatttaatctataatgataaagaatagttgagtctctgcactagtaggtaagtgctttatctgtgataacccagttatttcattgtctcataattayatcatcatgacagagaaagccagcttaattttttggcctcatggatataaagactccatatcttgctgggaacagtgactcaacgccggtataatcccggcacattgggaggctgaggcaggaggattgcttgaatccaggagttcattcatgactagccttgacaacgtagggataccctgtctctactaaaaaaaaaaaattagccaggtgtggtgggtggtcctagttactcgggagcctgaggtgggagaatactctggtctggaaggttgaggctgcagtgagtcttgactgctccacttcactccagcctgggttacagagtgagaccctgcctcaaaagaaaaagattccgtatctgtaaggtgggcatcagaaaattttttagggtttttgtgagttgacttcatgtctttaattagtcctatgcttttgtaaagtagtttgcaatatgtacctcaggctgtactcttcactctggaagctatttgaaaagtgtgtgaactgcagtttggcagcacgtgatgacagcagttcattagagcctctttctgtgggaagaagcagattggttttctttttcttaggccatgagaaacagcttagtgggatcctcaaagaaggtcagaaccagaaccrggtttttcagatgttgataatgtgaggtgggttgcaaggagcagcccctggtaggcaaggattggggctgctttgtccagatcactgctggactgtaaggctaatgtctttgtggttggtagtgagtgcaagtttctcaaagtacatcagccctacctataaacccttaatgccccaaatgacctcggtcaccaaaccacttcagggctttatttttatcctatccgttttgtttcaatatgtgaggttggtttctttcctctaacagagcagagttctctgggggaagaaacagagtgccagggtgctgctgaggctggttaaacaccaaaaccacactcttcatctttctggggttgagacgtgacataagccatgctgcaaacgccagcttccacactgaagaaacctctctcagtagtcactttgtttattttttgtgtattgtgtttttaggcaaataaaatatagaggagtaaatggtgtaccttcccattctgctgtagacagagatctaacaatgagcacttgcttaaaatctgccatttcccagcttaaggtttttcatcctccccgagagtgttgatgagaactctsaaaactcaccaggtctcaggaagccggattaccagcatatcctgttcgcgtgcgtgtgtatattctgtgttacccacaggccactttccaccccacgtgacctttagttaccatccggaaagtcaggacccagatacccgtcagaatttccaggccttggtttggtttagacattttagaagatgttaacagcaataattgtaaaagactttgagtggcacgcatggtgaacagaaagtactagatcctgaagaggggggaaaggcatttctgtgctcttcctggtaaagtgtttgaaaatgaacattcagaagaaaacctaaagcacctgaaatgcacaggggacgagaatgagaggtgattagaagcccaacacatgcaccagttcttaggtggtaaggctaagttctgaagttcatatttcattctttaagattgtcatatgcattattggtgttgtttatagcatactccatcacactttattttaaccagcatctctaaattaatataaacagactaatgattcaggtaataccctagaacagggatgggcaaaatattgccagtggcctatgagctaagaatggtttttacattcttatgtcaggagttgtttaaaaagagcaacacgagacagagatgtacgtggctcacgaagcctaaattattttctgtgaccttttacagaaaaaatttaccactgctgtaaaagctgggagaggtgaatgcagttaatgwtaaggttcttctgttaggaaattgattgttaatgagartgttaycgccttttaagcagacagttttttttttttgagaggcagtcttgctctgttgtccaggctgkagtgcagtggcgcaatctcagctcactgcaacctccgcctcccaggttcaagcgtttctcctgcctcagcctccccagtagctgggactacaggctcctgtcaccacccgctgctaatttttgtatttttagaagagatggtgtttcgccatgttggccagtctggtctcgaactcctgacctcaggtggtcagcctcccaaagtgctgggattacaggcttgagccactgtgcccggccgacagttcttcattatgcaggtstgaccttgcaggatgtttagcgttcctggctctgctcattagatgccagtaacggcccacacatacttccaaacagttcctgggatgggtggtcatattctggttgagaaccactacttttgaagcttgacaaggtcaaaaacattttgttaaggtttactccttcatttcctctcagagaacctgacttgggatttggatcttgatggcctagggattaacaatagtgagagaatttgagtagctagtggaatagggagagttttcagtagggtrgaatacaagattttaaggaaattttttttttttttttgagatggggtttcgttctgtcacccaggctggaatgcagtggcgcgatctcagctcactgcaaccttcgcctcctgggctcaagcaatcctcccctcccagcctcctgagtagctgggactacaggcacacaccaccatgcccagctaatttttgtattttccgtagagacggggtttcaccatgtgggtcaggctggtctcaaactcctgggctcaagcgatccacccacctcagcctcccaaagtgctgagattatagctatgagtcactgtgtccagcctaggaagtaatttaatgttgcgtttgttgcttgacacctattttaagaattgagattgatttgtgatttatgaaaggtttgttttgatgttgctggtgttgtgaaaagcacattcctctctatgtgagagatggagtagccatctttggccttaatatccagatgattttgaggtctgtgggaatctgtatggtgtacttgagggacttgttcaaagccaatgkaaagatgtagttttggcatctcatgaataacctgatatcccgacttaagccagaactctggcattagagaattttccagcttgggagagttgactgagaaaagtcctcctttggctccttgccaagttagacaagggagcaatcagctgctgagttccagccaactggaatgtacgtgagggggtactataaatcgtcccttaggatccagcttgtggtctgtgaagagccttccaaataagaatgagacctgtacattggatccttgttcaatctgcagctgctataggaaggagtagtgaggtgatgttactctgggagcagctcactttatatagtaacacactgcctgttatgtggggtaagactgcactaccctttatgtttttcccgtgttgcgtttctcaccaacttcctatattggtttttgtttctgactgttctcttggggagctgtatccatagtttgatcattctgtaaaatccctctttgctcttaaaggtgccagaatttcatctctctaccctcttttcaacatcttagatctgatgtatttgagctaagatagagaatatgaaatcgttgttttcttggctcgtgatccttccccagtctgcgggctgtttgtttgactccagggggaaactccaggttcttcccctcttggaagcctttcactttactcataaatatttagtattgaagtgaactgtgctcttttttttctccctagtatgagtggatagactctctagaccagaaagaatttaaaatactatctgtaccctctgtctttctgatgttttggttcctataaaatgtattaaccacacatttttatttttaagagcttaagtggttttttgagttgtcttccatcttctgatccaaaatttgttgagcatttattatagaaatcactaggcacctctcctgctactgttttttccgtgtcgttcatgcttagaaccatcagagagctatgtaactaggtaacattggttactagtagtactgcttttactgatttgtacttgagtgtgtcatcagcctctatgaagatacataaaaaagagacctagagaaggattgctgtttgtgttgcgtggtgtctttgtggaagcctgtggaagaaatttctgctcttagtagaaaatgggtttcttcaacctcatgcacatttgtaagattgttataatagcaaatttgtgaatttttaacccagaatgattctctattttaattgttccagaggttgtagccaaacttcctttagtaagtgtaaagggcgtttatcttcggtcgtgaccttactgtttggtgacctctttatctttttctctttggcttctctttcttgtttttatctattttatcttacagtatagtatatacctttgtatgttgcctaaaataagtggcttcaaagttttatatagatattttttctcttttcacttgcccattttgctgtaaaacctcctctgaggccagctagtagtctctgaggaaatcaagtttttccctgtcccaattcaggtcatttccataaatattcatggagcacctttatatattgttattctaggtactgcacacagaaaagtaagtgatgttggtccttccctcaaaaacacagtctagtaagaaaaaaggatatgtaaataaatacttgcaataaagtgttataaatgtaataatagaaatatatacactggacagaggtaaaagagattaactcagggtgaacaggtagagcgacctagaaaggtaatctttgtccttaattttgcaagtcaaagaagtattttaggtagatgtggtcagctgacttttctggcagaaggaacaacatggataaaaacatagcatggttcgaaactgcaaggaatggttgcttctgagattcccagccaagattctgtcattataatgtcttgggccatggtacagatgtccacattggtgctgtctratcactcagttggaactgaagattcatcacaatgtagatagatttgagcttttgatttggctcaagcttagaagtgaatccttcaaatagttctttctctgctttattttatgtattagcaaaggttgactcactctaaagtcatgccttccatcattctgggaagctttctgagccaagcccagcttggcttaggaataagttatgctttgtgttgtaatcattggcactaagtcctattcttgactttcacacacacagtaggactgcagctcctgatgcgtatgggaaagaggaattgtgataatactcgctatggatttacatttttctgggattttttttcttgataaagatgctaaaaccttattcttgctattgagattttgagtttacttgtgccacaaatctctgagatgctaggtcctaatttgtcaagcaaactatgttaacacatttgacattctcttctgaggaatgtctttggcaggttttcctttagacttctggacagatctataaaactctatggcttttgaaatacttgcaagtgacatatgtcaaaaggttgaataaggcactaatagtgcccttcgtgctcctaggaagctgtcacttgtggtcactgcagaccaggagtgagatcttatgggttgcattcctaaatttctttttgtttgcatgaacagattttttaatctctttccttgtctttacatccgtacactggggatatagcatacaccatcaacacatctgcacagctttgtccaccgaggggtagcagaaagttgtttattatagcaccagtcatcygcatgtctaccacctcagagttagaataatggtggggattaggacatatggggcaaagggtatttattggctgtgaaacaaaggctttttgtggactagtagaaaaagttgtggcaatttaaaaaattattgcagagttaaaagaaatcttccaaaaatatatatacacagaaaagtgcacataacagagccatacaggtgataaattgtgacaatgtaagcatacttgtataaccagcagtttatttrcttgtatcgctgtcattcttctcttccctttttttttttttgagacggagtctcgctctgtcacccaggctagaatgcagtggtgcgatcttggctcactgcaagctccgcctcccgggttcaagtgattctcctgcctcagcctcctgagtagctgggactacaggtgctcgccaccacacctggctaattttttttttttttgtatttttagtagagaaagggtttcactgtgttagccaggatggtctcgatctcctgacctcgtgatctgccctcctgggcctcccaaagtgctgggattacaggcgtgagccaccgcgcccgacttttttttyttttttcttaaatatatttttgagatagagtcttgccctgttgcccaggctggagtggaatggcatgatctcgtctcactgcaacctccgcctcccgggtkcaagtgattcttctgcctcagcctctcaagtagctgggattacaggcacccgccatcacacccagctaatttttgtattttcagtagagacagggttttgccatttttggccaggctggtctcaaactcctgacctcaggtgatccacccacctcggcctcccaaagtgctgggattacaggcatgagccactgcgcccggcctcttcccttttaactctaaactcaaatttttttctatacgtttaatgatagcagtgacagagcattttaaataaattaggaagaagttaatgcccatgttttccttgctttgtggatccttgttaagattgattttcattgttcagagacagaggacgaagagagaatttggaagataaagaattggatcaaagataaaagatttgaggtgtttgctttgacttttgaactacagagtttgggtctgggaaccagcacagaaaagatttgattgaccaaaaaaactagctggaagcaggccttgcctccagtcacagtgaaactgagtctctcaccaacagtgctgtggtttacagccttcatcttgaagcatctggctgtggggggggaaagtgacatcatggcctgccttctcctggacatgcttggttcagctcagatgtggaatcccagaagatctgcaatgcgtgtttctagccttgtttttagtgtcaaggcgaatgccaggctgtagcaggccatgttgttgtctttgtgtaatccatttgtattctaacagttttcttctttttctgctgctagctgccagggaggtagagttgcctctgttgataaagagcagatacagaagttcacatccaaacctgaatgaccatttttaacttgaaacacttttcctgggagttgatgcgccagaatccttcccttatttggtgccttgcttaaatctgaagctcgcacaaggtagccaaagctccctgtgtgctggttatttgctttatggcaaataaccacagcagagtggtttgtgaaaccgtctttgtgaccacatctatcttaaactgaagcttcgttctcctttgggttcttagattagttcgtgctcctccctttcctgagagattcaggggttttcctgtatggcgttaggtaggtagagaggttatattttcaaatatttttctggactgtgcacagtccctttattagtgtgcgaatgcacacatattccttgaactttttttttttttttttttttggagacagggtctcgttttgtcacccaggctggagtgcagtggcacgatctcggctcactgcagcctcaacctcctgggctcaggtgatcctcccacctcagcctcccaactgggactacaggcgtgtgccaccatagctggctaattttgtttattttttgtagagatgaggtctcactgtgttgcccaggctggtcaaactcctgggcccaagtgatcctcttacaggcatgagctactgtgcccgtccttgaaggactctttccttattcatcaggctcctgttgctttatcaccatgaataaacttgttcagttttacaattttatcttttatctcttcttactgatactatttgagggtgcatgttgttacatgcttctgccaacttgcatggtattgtctggactggaagtatttacttaccttaatctccaagacttctctgttggtttggcctggtggtctctcggtgaaagaaagctgaaaccattggtgggttttgtttggggcttttgcttttggtctttatagaaacattctccgtgtctgtctcggttctgctgaaaaagttgccttttgtttgtgtgtttttgagatagagtctcgctttgtcgcccaggctggagtgcagtggtgtgatctctgctcactgcaacttccgcttcctgggttgaagcaattctcctacctcagcctcccaactagctgggattacaggtacatgccaccacaccgtgctcatttttgtatttttagtagaaatggggtttcaccatgttggccaggctggtcttgaactcctgacctcggccccccaacatgctggaattgcaggtgtgagccatcgcgccagttccttttttttttttttgagctggcgtcttgctctgtcactgaggctgggagtgcagtggygtgatcacagctcacttcacccttcacctcctgggctcaagcaatcctcccaactcagcccatagagtagctgggactacaggctgcaccaccacgcccagctaattattttttcgtagaaacaaggtctctctatgttgcccaggctggtcttgaattcctaggttcaaatgaggttgcctttttttttttttttttgagacagagtcttactctgtcgcctagcctggagtgcagtggtgcagtcttggctcactgcaacctccatttcccagttcaaatgattctcctgcctcagtctccccagtagctgggattacaggcatgtgccataacacccagctaatttttttgtgattttagtagagatggtccttcaccgtgttggccaggttggtctcgaactcctgacctccgttgatctgcctgcgtcagcctcccaaagtgctgggattacaggcgtgagtcactgcacccagccaaggtcgccttttttaaaaggcgagaaataaagagctcaggctctaggcaagtcaattaacctctttgctgttttctgtaaggaaataatagtagtacttatcctcacagaattgttgtaatgttaacagacgcaaagtgcttagagtagtgtgctacacatagaagatgctatagaagttttgaccatctatatatgtatatatatgtgtatatatatatgtrtgtgtgtgtrtatatatatatatatatatttttttttttttttttgcgacagagtctcgctttgtcgcccaggctggagtccagtggcatgatctcagctcactgcaccctccgccttctgggttcaagtgattctcctgcctcagcctcctgagtagctgggactacaggcatgtgccaccatcagctaatttttgtatttttttgtagagatggggtttcgccatttggtcaggctggtctcgagctcttgatctcgtgatccgcccagccccccaaagtgctgggattacaagcatgagccaccaggcccagccaggaaaatttcaatgtactgtaaagtttgggaaccactgggctggaagataaatacaaaggcccgagttgggagcatactcatcacatttaaggagcagaaggaggtagtggagtaagattatataggtcttttgtaggccattgtaaggactttggctttcattctgatgttaagygtagtctctttttgcccactcacttaggctggaatgtagcagatggaattgctactactcaggatcagaatccttaaatcctgacagaaataccttttcctttaaatacctttgggggccaggcgtggtggctcgtgtctataatcccagctactcaggaggctgaggcacaggattcttttggccgggcgcagtggctcacgcctgtaatcccaacactttgggaggtgggcagatcacgagctcaagagatggagaccatcctggccaacgtggtgaaatcccgtctctgctgaaaatacaaaaattagctgggtgtggtggcacgtgcctgtagtcccagctactcgggaggctgaggcaggagaattgcttgaacctgggaggyggaggttgcagtgagccgagatcacgccactgcactacagcctgggcaacagagcgagactctgtctcaaaaaaaaaaaaaaaaggaagaatcccttgaacctgggaggtggaggttgcagtgagccaagatggcaccactgtactccagcctgggcaacagagtgagactccgtctcaaaataataaataaataaatacatacatacatacatacatacctttgtctgggttttgccacattactctccaaaaagaagtggatttaaattctcacagatagtgatgtgtatgctctttccctacaacattcatctctttttctcacgagttttcttgtatatattgcctggataacctatttaatccgtatcaaatctatctattttttttaaaaattaagtctcactgtgtctcccaggctggagtgcagtggcaccatcacggctcactgcaatctctgcctcccaggctccagcaattctcccacctaagcctcacaagtagctagaactacaggtgtgcgccaccatgcgtggctgatttattttattttatttttattttttgtaaagatggagttttgccatgttggcccaggctggtctcaaactcctgagctcaagcgatccacccgcctcagcctcttaaggtgctgggattacaggcgtgacccaccgtgcttggcctttagtctttttaaaatactcatgcttggttctgcaccaccgctagtctgtaaattaagttacttggaactagaaccactgagacttaaagacagggctcatgattgtccaagtgtggaatgacaatcttcacatcttccctccctctgtgtttccattgccagtggatgattgcaacaacaaccttttacctggtctcctcacctccacacacttgactccacccaacccctcacccctcaaaaaaaccctaagttttcttttttttttttcttcttatttatttatttatttattttattgatcattcttgggtgtttctcgcagagggggatttggcagggtcatgggacaacagtggagggaaggtcagcagacaaacaagtgaacagaggtctctggttttcctaggcagaggaccctgcggctctccgcagtgtttgtgtctctgggtatttgagattagggagtgatgatgactcttaatgagcatgctgccttcaagcatctgtttaacaaagcacatcttgcaccgcccttaatccattcaaccctgagtggacacagcacatgtttcagagagcacatggttgggggtaaggtcacagatcaacagcatcccaaggcagaagaacttttcttagtacagaacaaaatgaaaagtctcccatgtctacttccttccacacagacacagcaacaatctaatttctctattctttccccacctttcccccctttctattccacaaaaccgccatcgtcatcatggcccgtctcaatgagctgttgggtrcacctcccagacggggtagtggccgggcagaggggctcctcacttcccagaaggggcggccgggcagaggtgccccccacctcccggacggggcggctggccgggcggaggcgcccgccacctccctcccggacggggcagctggccaaaaccctaagttttctaaacatccagaacaacctttacaaatacaggtttgctcatgtcacttccctgctgaaaacccttcagtggctttaatgaagatcacattyttttttttttttttttttttttttttgagacggagtctcgctctgtcgcccaggctggagtgcagtggcgcgatctcggctcactgcaagctccgcctcccgggttcacgccattctcctgcctcagcctcccgagtagctgggactacaggcgcccgccaccacgcccggctaattttttgtatttttagtagagacggggtttcaccgtgttagccaggatggtctcgatctcctgacctcgtgatccgcccgcctcggcctcccaaagtgctgggattacaggtgtgagccaccgcgcccggccgaagatcacattctttaacaaggacctgtccaacatgccctgcccacttctccagactttcttacagaatcaatcatctagccatgccagtctacaatgtaccacttttgagaacatcatatatgttgttccctttgcttaagacacaccaggacgtgactccctctcctctccaaaaccaactgtttcttcaaccctcacttttcaactcaaaggtcttttcctctgagaggatatctctggtgctgcttctgtatatttccacagcatcctagccttccccagtcatggcacttcataattgtctgtgttacccatagagsaaggattatctctgccttgttcacagcttgtgcactgtgctttgtacataaaatgtgcccagtaggtttttgttgaatgaataaatgtatgggtccatgtgtgaggaagtcttcaccatccctcttacgctgtgtcaacctgttgatttataagatgggtttgatggccgagcacggtatctcacgcctgtagtcccagcactttgggagcccgaggtgggcagatcacttgaggccagaagttcaagaccagcctggacaacatggcaaaaccccgtctctactaaaaatacaaaaattggccgggcttggtggcacgcgcttctagtcccagctacttgggaagctgaggcacgattgttgcttgaaccccagaggcggaggttgcagtgagctgggattgcaccagtgtactccagcttgggccacagagcaagactctgtctcaacaacaacaaaaaaaatgggtttgagcttatgtatgtgctcttggaaaactgttatctggttgtccatgggatcacgcagtgggagcttcagccatttcctcttctctctcacttcctggagtgcagacacagcgtgtcctagctcccctactatttgggtggatgggcatgagagttcccaggcatgagagagatgaggcagaaagaagagtcattcagaaagtaactcagtcagagcaacagtgttgccctttggctgaactttctttctctttttctgtgtacctggagatgctaagctggtggcacatttgagttggttgttacagattgtcacaccacagcatagggattcataaatcttaatctggcactttcctttgatagggatgttttgggaaacgtccaggagccctctggcctaagtgaagtctccgttgggcttgggtgtgttctgtttctaccctgcaggtggaaacctggagagtcccatttatatttctctgtagcctttggagtgtgtgactgtccgagagcaggagtctttggcatttggtgtcacttgtgctatcatagaatgggatggtgcttacacagaagctggcaagaaaagttatatttacttagaattatgcatttgtgggctcttagcattgggagaaatactgaaaattggtgcttctcctgtggtggtgagaagtgggtggatatcagaatattctggtggcggaggggggtcttttaaaccatactcttcatcactacccatcttcacctcttagctcatgagaatcgtgactgtttccagtacacgtgtgtggtagctctgaagtgcggtgcaggaagaaacatcttttgagacaccagcgttgtagattatttagcccaggtatcagcagacattttttttctgtaacgatctggatagtaaatattttaggctactttgggagaccgaggcgggcggatcaggaggtcaggagatcgagaccatcctggtcaacacggtgaaaccccatctctactaaaagaatacaaaaaattagccaggcgtagtggcaggcgcctgtagtcccagctgctcaggaggctgaggcaggagaatggcgtgaacccgggaagcggagcttagagtgagccgagatcgcgccactgcactccagcctgggtgacagagcgagactccatctcaaaawaaataaataaataaataaataaataaataaataaataaaataaaatattttaggctttgtgggccatgtgccctctgctgcagctactcagctctgcctttgtagggggaaagcagccactgacaatatgtaaacaaatgagggtggctgtgtttcaacagaattttrtttatggaaactgaaatttatatttcatataattttcatgtcatcaaatattctcttattttttttttcagccattaaaaaaatgtaaaaaccattcttagctcatgggtcatacaaaaacaggtggcaggctacatttgacccatggccatagtttgccagtgtctgatatagcccagtggtttccaaatctggctatctttcacagtgacctggagacctttaaaaatgttgattcgaagtgcccctctctcgtccttgaggattctgattctgtaggagtgaggaatctgtattttttataaaagctgttcaggtgatagacatacactcaggrttgtggaattagcagtactgatctcactcatttaactgttgaagaaacagccctagaagatttatgtgacttcctgataattaacagcaaataaatggcatgaccaaaattcgaacccaggttttcaactcttaagatcagcggtctctgttcataccattctgtcatattccttcccccagtaaacacatgagcagtaaatacaaaatactgaacatattcgtggctccttcttttcttttcttttwttttttttgagttggagtcttgctctgtcaccaggctggaatgcagtggcgccatcttggctcactgcagtctccacctcccaggttcaagcaattctcctgcctcagcctcctgagtagctgggactataggcacacccagctaatttttgtatttttagtagagacggggtttcaccgttggccaggatgggctcgatctcttgacctcgtgatctgcccacctcagcctcccaaagtgctgggattacaggcgtgagccaccgtgccyggcctccttcttttcttttttttccttttttttctgagatggagtttcgctcttgtttcctaggctggagtgcagtggtgcgatcttggctcactgcaacctccgtctcctggttcaagcgattctcctgcctcagcctccagtgtagctgggattacaggcatgagccaccacgcccggctaattttgtatttttagtagagatggggtttctccatgttggtcaggctggtctcgaactcccgacctcaggtgatccgcccgcctcggcctcccaaagtgctgggattacaggcatgagccactgtgcctggccccttcttttctttatacctggtgccagtttcctttctgagagccagccaggtactctgagctcggctgtccctctgctggttggctgtgttttctggagctgcctactgatttagctcaatttccctcagtctgctggctttaactaggagggataacgaagtaacaaattgctttagtataagaggcagcactaaactgcagtgcaaagttgagaggcattgtttcaaggggtgcgttagttggaagaggtagttttaaaaggcacattttacacttaaattcacatgtctcagatctagccatcttaagtgggacatctgtacaggaacttatgtttaattgaagctaattgagctgtcatccagccctgaacagttctggagtggaggaagtaaagggtgaagagctgttgccatcccggttctacctcagcctcagcgtggctctttggtccaagtaaggggcctaagggttgatttgatttgctacatcttcctacgaggcatttgagtcacgctatttggttttcccgtgcttttttttttttttaatctgtatatcctggaaagaggaatgctgaaagtactaataatgaataactctgtctttactgaatgattattgcattactgatgggtttccacattttttgtaccaggccccccttccctcattttttttttttcttagattccatctcatctctgtgacaggaaaaatgacagtaagggaaacacagtgcctcctggaaccttcataggccttgtcttaggtgtgggagcataaatggccagtgggcaagttggtatgttatttatctttgttcttggactataagctccttggcatcagagaccctatcttgttggtttcctcttatgcccagcataggagcgcagggatgaggatgacgtgtgaacaacatcaccagtgcgcccacatcctcctccgccttgtgatctcattgcttgagagagactgataagtgggctttgattgaatgctgtgaaagtcctggctgttttactaacaggtactcatgaaatttggtctccacctatgttgtctcatatctaagaggatagatcccttttctaaaatgcaagaaagttttgtttttttaaaaatatatggggccaggaccagtgactcatgtctgtaatcccactactttaggagggtgaggcagaggatcgcttgagcccaggagtttgagactccttggcaatatagtgagaccccgtctctacaaaaaataaaaaactagccaggcatgattgtgtgtgcctgtaggcccagctacttagaaggctgaggcgggaggatcacttgagcytaggaggtctagacaacagtgagccttgattgtgccactgtactccagtctgggtgacagagtgagaccctgtctcaaaaaaaaaaaaagtgtatataaaaatagagacattccatacagataagagaataataatttatgctcctcaaaatcactttaaaatgcactttggaattcctttaatactgactacccttactgtccttaaaatgattcacttttcagaaattcggtttttcacacgactctgtagaagcaggaacgactctttcggaactgaaattgggcctgtttcagaatcccctcctcttgcgttgttgcctctgagcagcttctctctccttccttgctccacagtcaccaagcccttagacacaattttgagtgataactttcaaggcttgtgtaaaacatctactcctcagactactttaatttgtattatttcatttcatccttttagttctgaattaggtaatgtcagtggtagaaattccattttacagtccaggaacaatscaaaacattttacttataatcccacagttaatgacaggacggactttattgtgtgtccagagacctacccatccatctactgccattggtgtctctttgggttgagctcaggagtccacagtgaatttgttttggacttgagctaaggagccagaagacctttaataattctaacactacctctcagggatacacccaagaagcatttttgtttcagtgaacagtaggtaaatatgtaaggaagatctgaacgcaggtggcctcacaatttgagaagtaacatttattttccacctgaccgagaaccatctaggtgtattgttaaaaatgaaaaaagtctgccaggcaaggtggctcacgcctgtgatctgagcactttgggaagccaaaactggaggattgcttgaagccaggagtttgagaccagcctgggcaacaaagtgaggagaccagcctgggcaacaaagtgagaaccccatctctacaaaaaatgaaaataaattagccctgcacattggtatgcgcctataatcttagcactttgcgggctaaggtgagaggattgcttgagcccaggagtcagaggctgcagtgagccgtgatgttgccactgcactccaggctgggtaacagagtgagacactgtctctaagataaatgataaaaattgaaaagtggtagaaatggaagccagtccatgctgatgtgttaggaaggaagaaggaagctcggactaaggtttttgtgactatgggtttggggtcagttaagagttctcgcggtggctcacgcctgtaatcccagcactttgggaggccaaggcgggcggatcacaaggtcaggagattgagaccatcctggctaacacggtgaaaccccatctctactgaaaatacaaaaaaaaaaaaattaacggggcgtggtggcgggcgcctgtagtcccagctacttgggaggctgagacaggagaatggcgtgaacccgggaggcggagcttgcagtgagctgagatagcgccactgcactccagcctgggtgaaagagcaagactctgtctcaaaaaaaaaaaaagttctccaaagtatctgtctcagtgctagttgacttcatattgtctcttgtaaatgttgtttaggtccgatttgatcaatatgtaacaaatctgctccttcatgtcacataccttctagatgtatctacatttttagctcctttcctaattgaagtgttattgatgacaacaaagagaaagtatgtttaacagtgaccttcagactaaaaataaagcggtggttctcattaactaaggttagggagagtgtgtgtatagtttgaaaaggttatctgagattttcttcactcccactagttgaaaagtaatgcattgaaatcgactttttgcagttaaaatacggtagtggcaagtacagactcaggtaattaggtgggcttcatctcctaccctaagggaaggatgtttgtgaagtacacatagaagcacagatgttccaaacctcttggggctctcgttttagtccaggaggtgttgtggttcaaacagtatgagtttcctacctaatcaggaaggaaaacttaaaagcaaaacttgaacggcttcttagttgctcttattccctcgttagcccttggttgaatcagctcaccagttcttttccccgagataggtgtaggataagagaaagaaaactgtgtttggaatctgaagacctgggttcaagttctgactctgccatttactaaagtaaagttgcttaaatttctgagttggcttgggggatggtatttaggcttgaatgaagtgggttagtatctttttatttttattttttattttttgagatagagtctcactctgtctcccaggctggagtgcagtggtgtgatctcggctcactgcagcctccgcctcccaggttcaagcgattcttctgcctcagcctcccaagtagctgggactacaggtgcgtgccaccacgcctggctgtttcgtttgtttgtttgtttgtttgtttaacagatactgggtttcaccatattggccaggctggtcttgaactcctgacctcatgatctacccgcctcaacctccaaaagtgctgggactacaggcgtaagccaccatgcctggcctgtatcttttttcttttttctttttttctctgagacagtttcattctgtcccctaggctggggtgcaatggagcaatcatggctcactgcagtctccgcctcccaagttcaagtgattttcctgcctcagcctctctagtagctgggattacaggcacccaccacccggctaatttttgtatttttagtagagacagggtttcaacatgttggccaggctggtcttgaactcctgaccgcagatgatctacctgccttggcttcccaaagtcctaggattacaggcgtgaaccactgcacccggctgtacaagtaacctttatatataaccagtttatgaaagacttaggatataaatagaaccagtttataagggattccttctgattatgaatgaattaaccaatttatgattgacatctataggaagagggataaccaagttaaaataggaagagagagagaatgtgtattcttaactttttatttgaaataacatcctatctgtggaaaagttgtaagaataacacaaaaaactcccacatattcttctcccagattctccagttgcttcatttcaccacttgcttcatcatttgttaggagagaatgttaacaattgagtgtttacaggtcaagcgagcatttagatccgttgcctaagatcccaccgcaggtaaatggcagaggtctttcatgggaaggtccctgtttctcaccatcttcctctactaggaaatctagagatctgcattctggccaggtttcgccactaatgttggtgtagccatgggcaatttattttgcagctgttcctcactcttgtattctagtgtttttgtgttttgttttgttttattttttgagacagagtttcgctctttgttgtccaggctggagtgcaatggtatgatcttggctcactgcaacctctgcctcccgggttcaagcgattctcctgcctcagcctcccaagtagctggcattacaggcacctgccaccacacccagctaatttttgtatttttagtagagacggggtttcaccgtgttggccaggctggtcttgaactcctgacctcaattgatccacctgccatggcctcccaaagtgctgggattccaggcatgagccactgcacccggcctcttccattctgttgatggaacccagtgtccctggccctgactcaccttgctgtatagacaggttatcttcaatgaaatattctgagctttttatctataaattaaatgagtgtaactcatttaaagcaaaaatagagtgaacattctatgcagagtttgatgttgatcattggttaagtgagaatgtacctcttttcccacacttggcttccatatgaaatagatggaactgccatagcttgattgatgttctgttttgtcagaggattaaacagggactttctccttgtggggcagactgcccagcgatactggactccttgccctgaccactgggatcctggggtcaagattcttcacttctcttcctggctggctacagagccctgaatatactgcttctaggagaccagggaagatgacaaggaggtttagtttttagattgtttctrcttgctttggatttgaatwgaaatttttttccctcccttgttttgctgagaaatagtttggtttcaatggaagtagattktctagaaccttgaaccacgattgtaaattggtggctcatgggccagatgtagctggcaaatgtgttttttggcttctttaatgcttaaattattttcattagtagccaacatgtaaaagccagagtatttcacataaaaatccagattcagccaggtgcagtgactctcacctctgtgatcccagcactttgagagrctgaggcaggaggattgcttgagcccaggattttgagaccagtctgggcaacgtattgagaactcctctctacaaaaaattaaaaattagctaggtgtggtgacacatacctgtagtcccagctactcaggaggctgaggmaggaggatcacttgagcccaggaggttgaggttgcagtgagctgtgatcacaccactgtgctccagtctgggcgacagagtgagaccctgtctcaaaacaacaaaacatgctgggtgcagtggctcatgcctgtaatcccagcactttgggaggccaaagcaggtggatcacttgaggccaggagttggagaccagcctggccgacatggcaaaaccccgtctcttctaaaaatacaaaaattagccgattatgggggtgcatgcmtgtaatcccagctacttgagtggctgagacacgagaattgcttgaactgggaggtggaggttgcagtgagctgaaatcataccactgcactccagcctgggtgacagagcaagattctgtctcaaaaaacaaaaacaaaaaaacccagattgcagtttccagcttgggcctacatagaggatttggccaaaactggagtggaatagtcatagcttgctactgtctccatcagcatacttcacgcctagccctttagacacttgaattttcaactccagacctagaacatgaactctagtttttaaagctggtgaagtacaatttgatgagctagttagtggtgggttaccttgctcttggttgtcaaagagtcctgctttcctagctaggtaggtagaaaaataacccaaatagaaccagggccttcactattatccttgctcctgttagagtttcatttccatgattatggagccggagtggctcctagatcctcagagagctgtgggcacctttctttatatcctgcttattaggattcaccgcctcatcccctgcacacaggtgccactgccggcagagggtgctgtctgctcactgagcctgttgtcatcttggctcagctgagcggcagctgttgggcatgtgccctgggtctgtgagagtttgggcatgtccatttggttcccatccctagtgcccaccccttagaccctggccaggttattktgtcactggggactctgttcagtaacaggaaactggggaaagtttaattgttttctcctctccctttttcccatgcagctgaacaaaaggttcatcctcagttttctccatgcccatgggaagctgtttacccggattgggtaagtgtgcaggatgtttattttattttcctacattacaagtcattttggaatttaatattgttagcaactggactgtgtttgtaactgagggcacagggtgtgaattcttagaggcctccaccttctcttctcttcccttcatcttctgtcctactgtgctcatgaaatttggtaaatattactctctatctctcttgtttcttctttctctacctttactaaaacactcctttaaatacartcttgtcccagcccccaccccagtccctctgggtttctctttcctctgccttcyggcttaggtccctagtgagtgcctcagggcagttgtgctaaatccctgggtgcagctgtcagggggtcctccttgggaagaatactgtccactacttttccatcaaaaataagagtaacattttctttctatatccttttgacccatatcctttcctcctatgctcagattcctttgccatattgctgatctcattagataccaagcctcttacggtttcatcatccaccatggatttccatagacatctcagggaaggtagtgtgtgcaaaactaacacttgactgcttaaattcctggaaacagatcgagttttgagtattcctttattccttggatggatccgagttcttcctctctgcrtaaaactagtgatcctaagcccaacgtaatgcctacacgccagagcagatggatgcctggtgcctctttagtataggatctccctgagtataggagagtgaagaaagtagtaggtggcagtgcccccagaccagtcttccactagaccagttttctactggattctaatattttctgagttggaagttgtattgtgagctaccctttggggtgatttgttttgaattatgaataccccagttattgtcaatgtttccctttcacttcccgtcataacttcgtaagtttatctgtaattctctagaaggcttttttttgagacagagccttgctctcttgcccaggctggagtgcagcggcatgactcgactctctgcaacctctgccctctgagttcaagtgattcttctgcctcagccccccaagtagctgggattacaggcacatgccaccgcgtctggctaatttttgcatttttagcagagatggggtttcaccatattggccaggctggtcttgaactcctgacctcatgtgatccacctgcctcgccctcccaaagtgctgggattacagccgtgaaccaccacgcccggcctagaaggctctcttagtggaggtaggggctatgtcagtttccacataccgttgtagttaacttttttgagaagcggaaaggcttggttccactggaagaaactctgstccacgggcggtggactagaaagtgtgcttattacatattcatttggtatcaacctgggtaagaatgatagtgatggtcattgcaagcatagtttggatttcaaaatgacttgggaaaattggacaaggtaccagtagatgaatctctatctgtagacataacrggtggagacattcacttaggcaaagtaaastagatgcatcactggtcccatctcctgcctcccacctcccccgtcctgccactgccactgccaccagtttaagttccactctggcagtttttgcctcactgttgtgttcctagagcctggcatgtagtatttgttgtacaaatgaatgaattataaaaagacggatggattgctaagcactgcagagaaatatgtagtattctagtaggttactgtagacccaagacaatcactagtgagtaatgtaaggctgtagttacaaggttgaaggtggataagatgatatcggtatcatcttaaaaataacacatccgagtaggaaataccattgtgctacacttaaagtgacagttgatggtactcctgcttctttcttattctttttttttttttttttttttttttttaaagagatggagcctgtctgtgttacccaggctgaagtgcagtggctattcacaggtgtgatcataccgcactatagccttgaactcgtggctcagcctcccgtgtcactgggactgcatgctcacaccaccacagatggcttatttatcttttttttttgagacgaagtctcgctctgtcgcccaggctggagtgcagtggcgcgatctccgctcactgcaagctccgcctcccgggttcatgccattcttctgcctcagcctcccgagtagctgggactacaggtgcctgccaccatgcccgactaatttttttttttttttttttttttgtatcttcagtagagatggggttttactacgttagccaggatggtctcgatctcctgacctcgtggtccacccgcctcagcctcccaaagtgctgggattacaggtgtgagccaccgcgcccggcctatttatcttttattctcgttttttcacctttctctcctttactacttttcactcagtgttttctctccttttttcctttgcctatgtttgttctttaaattttcccgtaccatgttgccctaagtcaggatttcccaacccttggtgctgtcgacattttgagccagatgactctgctgtgaggggctgtcctgygcgttgtaggatacttggcagcatccctgccttcttcccactgtgcaccaaatgtgctgactcagaatgtctccagacattgccacgtgttccctgggagacaaagttgcccctcactgaaaaccactactctagatatttcttgccctgttagagacttttgggaataaaaaagttataaatcttggtgcagaatgtaggaacatttaggatatatttttatcaggttatgcagtagytaaacaccctgatttcccctccacttctaaaattcttatatttygacacatattttggaataagtttgggaaaggaccacagtaatgatgaaaaagcgagataatgaccgggtgcggtggctcacgcctataatcctagcattttgagaggccaaggtgggagaatcgcctgagcccaggagttcaagaccagcctgggcaacataggcagaagaccccatctctctttttaatgagtataatagataatttttttaaaagccagaaaatgagatctgaaaggaaaaattaattttgaaaaacattaaggtaaaaaaatacttatttagagacagctgtagggtgcctaacatgtttaaatataaaagggtcctaataggatagtcttgatttttatgggatgacagtaagagaaattggcttctgttgtagctggagagatttgggttaggtgtaagaaaatttcacagaagggaggatgtttgagagttttcttttttggaggcctttaaaaatgaatagatatctcatttgtctgaggtggtttactgtgttccaggttatttttcaggatctcttttattcctgcatataacatattctgttgtcaaaaaggtaaagccagcccaatttcaccttcctaagaaatgacttatggtagttttcattgaggaaaatgtatgtggattctaggcactacactccctctatgggtatcctcttattctgtcctggaggtaaaataaaattgagcgccatatttattctggaaggcagaaacagaaataacatttctgttgcagggaaaaaggtatagaagtctgtaagactaggaaagcaatgagcccaagccacacacaacatcgtagactgttgcctaattacgaagaagatgtgaaatgtgggcggtgttgaaaacgaattaagagtgaggagattgtaatggggagcagctgaaggcacatcactctcccgcctgccctttcggaaaagctcggacgctgcgcttccaggcatggtctgctctgtgcctggtgctccacactgcgtcagcagagactcgaatgcctactatgtgcaagataagtctcttaactcccagcactagctgacgagaggttcagagctttagaggaaatattcagtgccaaaaagagtttgtttttcaccacttactagttacaagatcttgagagtaaacaagtcagagctgctgcgggcttcaactaacctgatcagtggtttaaagatatggtctctgaggtccattccagtccttatgttctgtagtactatgatttgtttttttttttctcatttccaccctgtcacatggcttagttttttggttttggtcttttgctcctgggttattcgtatcttgctcgttttttaaaaataagaggttgagaaaaactaacctggattgttttctgcagagaatgttgtctagcccagctgtgttcctcagcatctgagggctgagtcctgctcggttagtcaccgtctgagtcagtcctgggcctaggtcccggtgttgtctgaaagattggtttcttgaaactgccattcaaatgaaacaaggtgtctctagagatcacatcacaaggcagccactttagtcagtgamacacacagcccgaaaacgatggtatcttctgaggttttaaaggatagggacagagtcatctcggattcgggagaagtactcagtcggggtgccatatggctcctgacagaccctttcctggtgagaggcagatcacacctgcacttggactccactgagagaggttaggaagctggcagcctataggctctgaatttgtgacaaatagtatgcttttgcttcctcttattgccttgatcacagttaccactttagcttttacttgcttgcctagtcatgctatttgcatagcttcgaagtctcttggaattcaaagactgatatatttattttgtacttttaatttttaaaaatataatgtttgtgtctgatttgctttttaaattaacagatgttcttaaatacaaaagtaagatgtattcattatgggagaaatcttttctttctttacagtgctctttgtaaagtatttagaaaactcagcaaagaagaacaaataaaaaattacccatattcctaccacctagagataactccaccgttaaaatttggtaaaattttttcaatttttttcctacatatcacatacacactttttttctattgctttacaactattttcatttaatatgtttggaagtttctctcacatgattaaaaaatgtaatacaacttaaaaaaactagtattcaattgtgtgcatgttccatcttaatcatctattgttgggcactttagattgcttccaatttttggcgattataaatgaccactttttgtatgttttctctgttgcttctcttcctgctttattgctgagactgctgtttcttcttggctataattttataattattacataagtattatccagaaatccttataaaagtataacattaaaactaagagtaaaatttcttttaactctgtgccctccaaaaagatagtagtagacatcagggcgtgtattcttccagacctttcactcatctacctacatacttacgtacgtgtccatcagtaatgcggggtgaagcaaagattatttctcagagagaaagacataaaactacttacaggtagtttgaggccagaattagatagcattttggttacaaaactggaaaccagaaaccacctactgagccctgaggagggttcctctctttatctgtgcctcccgtggttactgctgaacaaggctggttttgcatgaatagatccaccttctctcacatctcacatttgaagttactctaacttatatccttctgctttcagttttttcttttgttttaatcatgttgaattagttggaaggcaaagggagaattttttttaaaaaactttttataaaaaggaaatgtggacatttgacctggtgctcgttcaagacttcagtctgacccagagagtgttaatggatctgtttccaattcctactccagggaagaggcttcctcagacacagcttcgaagcaaaactgtcccacgtgacacttctgtcctgtcgttctgtgctggctctctactgcctttcaacacggagacacatggctctgaaacttgcccagcgtggctgcttttcaagcagagtgaacgctgctattctcgtaacgagaagtgctagccccctccccacctctgaccagaaagagtgctgcacagtgtcagggtttaaaatgaaacctttgttagagcccgtggggaaaaacggatctagtccagccccaaacatgtcactctctgccattccacatcttccaagagttttaacggctctgaaattttttagagaaaaaaaaaagagttttgttttgttttggaggggtgggtacttgaaatggcatgtggagaaaaaaagcaaatgcatggcatcttttgtgccaatgaaaatgaggacagctcagcagaggagggaactggaatgtaaactgtaattgacccataactgtggcacgacttctgggcaccagggggtcagtaataagagttgccatccaagtgcaaggagtgaagattgccaagattctagaaaacctggagttttctaatccagggaggacacttcccagtcgggaagggccgagatgggtgaagctagaagcaccttcctctagaacttgaaactgctttctatcttttgagaaggattaccttccttgtggcttttcagaagctatttgttaatccaacctggagctgtttccccaaccccacaagtatgtcacaagcagtttgtttatttgggggctgggggacatggtaaaaaatactttggtgaccacgaattgtttggcataaccctaaggcccatgtgcctggctactctctctagcaccaagcttgaacttgctttttatttctgaagacttcagctgtggtttgtttctgttgccaaagaagctccaggcatgcaccactgtttgggatccagtggccacatttggcaaggagtgatttgaatgacctctccttaggagccctaggtcactggctagatttctgcctccctgcgttacagcctcttcctgtattgggagtggcacttggccagggcattctatttccactggcctgaaaacatacagaccccgatgagcagagccttgtgagagggaggaggacggcaacacacgaagaactgagacagatgactgggggcttctaggtctaggcattcttcaaggggaaatttgggatcgttaggcggaacagtcagtgtgatagtacctcagaagacaatagcagaactatgtctggttacctaaagtaaacgcttgggtaaaatrtctttaggccgagtgcagtggctcatgcctgtaatcccagcactttgggaggccgaggcaggtggatcacttgaggtcaggagtttgacaccagcctggccaacatggtgaaatcccgtctctactaaaaatacaaacattagccgggcatggtggcacatgcctgtagtcccagctactcaggaggctgaggcaggagaattgcttgaacctgggaggcagaggttgcagtgagccgagattgggcgaaaaaagcgaaactttgtctcaaaaaaaaaaaaaaatttttttttttttgtttagattcacattacttttttaattgaattaagtttcataccagagagtttagggactgtgaaggtttcaggaaatttgttgagtatttagaaaagccgatggtttcagagagaaactttgatattagcttgaacacagttattgccaggggtgaggaaatagcataccaaagcataataactcatagtgatttatccaaaacttgagttgtttgcatctctggaccctgaaaactcctttatcttgaatttgttcaaaattgcaggataccgggaaggtttgtgaaagtagcaaagaaatgtcctaggcagtagttgtctggtgtgtgtgtgtgtgtgtgtgtgtgtgtgtgtgtgtgtgtgtgtgagacagagtgagagagagactgaaagagagaggtgcctcattgatgggttttctgaatctgcaggatggagacattccctgcagtggctgagaaggtcctcaaggagttccaggtgttactgcagcacagcccctctcccattggaagtacccgcatgctgcagcttatgaccatcaatatgtttgcagtacacaactcccagctgaaaggtaaggcatgtttagtttcttcatctagaatatagacagatagagattaatgtagcttctttcttgtgttaccatacctaccatacctacctccccccaccccacccccgaacacacacaccctaccctacscttcctaccattgtctcagatatttagtttactttgaaatctgtatgactctctagtgcttgggtgggatggaaggagggaatcatgggtatagagcttaatttgcaaatgcagagatgcagttgcacatctggccacgcgaaaggcagcagcaaggcctcttgaaggctgcagacccagagcctctcccaagggagaggcattgctgagatgtttcattgcagagaccatacgcttggcagggattgggaatagctgtttctggactcatgtaccctgtttgttcaatatggaaaagtctagttccctatgggatatccctagtgggagcctgccagggagtaagaaccgagaattgatgagctttggtgactcaaatctggaagcacaaaaaccaccastcccagaatttagctattataccagtgtgcattctaaaatgtttttctgaacattttggggttttttcatagggggtcgggtgggtgtggaagtagaggggagaaggacagattggcagggttttaaatgttctgatgaccaggtcagggtcaaaggatgttaccaggattccttcccttcccttccgttcccttcatttcacttaggtaaggatgatatggtatgacttgatggaattatgtagtacagggatgacattattttctgtgtctgttcgcaagggtaatttggtccatgctgcctaggagtcatttcagaacactgacagagagtgtttggtctcagggcaagaaatgccaggaagtgggaattggcccatagagaccctgctgtaaaacagatctggtgtttcttgacagagtgscgctgggtctcttgttgccccttttcatagcactttctctcaccatgaagttgattgatttatctccccgtttgtacttaagggttatgcttcacttggttgtggtgggggagtgaatatgccacactttgccttgaaatggaaatgcggatctttctgggactaggcarggtcctctcagagtgtgtctgggttctcagttacttctgaatcctagaggatttcctcctctcatgctgcctgctacagcgtttagaattcccagcagaaagtgagatccaggggcttagatgcctttttgaacttggctaatttttcctgagatggctatttgggtaaatggccctgaggaagcatcgattcttaagtggcagcactggtttccagggagaagagaacaaagtttgtaaaatgctgtgctggtgaggcccaaaggggagggacagtctgctaccaagtaggaagcccacctgactctggaaatgggccctcctgaggtgccctcctgttcattcccatctcccactaaaaacaacccacagagttcagtgagctacctgtcacagagctgcagcctcagccaagacattgttccagcaccaaatgacctgtggcttctttaggtgtgaatgtaaaggacctgcctttaaataccaaaaattagctgtgcttggtggtgggcacctgtaatcccagcttctcaggaggctgaggcaggagaattgcttgaacctgggaggtggaggttgcagtgagccgagattgcaaactatactgcagcctgggcagcagagtgagactccatctcaaawaataataataataattaagaattaaaagcccttgcccatgaagcatctgttttcagcagcttctattccatggaaaggaataccttggccttttaataggccaccagtgagtctttttcttgtagctgttgttaagtaaaggttaagaaaataatggtaggccgggtgcggtggctcacgcctgtaatcccagcgctttgggaggccaaggcaggcagatcacctgaggtcaggagatygagaccagcctggccaacatggsgaaaccctgtctatactaaaaataccaaaaattagctgcgcttggtggtgggcacctgtaatcccagcttcacaggaggctgaggcaggagaattgcttgaacctgggaggtggaggttgcagtgagccgagattgcaaactatactgcagcctgggcagcagagtgagactccatctcaaaaaataataataataattaagaattaaaagtaaaaaaaaaagaaaatacaggtaaaaggaaggtaagatggtgagtacagagaaagaaatcggttgttccctgatgtgaggccaaggcactttttctaggactcttccatggtgggtcataacgagtaccctctagccaggagagacatggaaaaataaagcccgtacttgagaccctacttttcatgactggtctgctcctgactctcacctcattgtcacctcgatgaggtcactggggccaagaagagtatgggttgaggtgttcagaggctccaagggtgtttcaaggaaaaacggcccaggccacaggatataacactcagtgaggacagagagctctgtggacgtgctgccaagtacccagtgtgcagctgaggtggccatccagaccccgctgtgtgggctgccattgggacaggggcgagcagagtgctcggcagggctggctggtgggaagatgcacttttccatttcccagcacatgagtcatcatctttggtcccctgtgctgtgctgtgcttgcctggacagtggcaataagggggtgttgtggctgagtagcagcatctgtgccgggggtggagaaggaggggggttggggagagggtaaagattgaaatccttcactaatcagcagcagttcgaatcacatttttatgagtaaggaagtgataaatcagcgctgtgtgttcaacccccaagtcccgtcagccagtgcccttctaaaggtttctcccctggccagtctgcattctgtcagagttgccacccaccatcagggccctggctgcctgaaaccaggaagcaagagcctgatgctgccttgccctcccaggtactggggtctgtggtgaattggcagtcactgcaagctacagaacatctgggccatcatttttctttccattccttcttggacatgtccttctgggtgggtggctgcatatgtcagtttccggactctgtggagaaggagcattccagccggaagcagaagtgatcttgtggcccaccaggccattgagatcctcacagtctctacctgggtcttccctgtagatgtggtgcctaaggagtgtgatttggagagccacaggggagcagattcctttctctaaaagtgtgtcctttgctggtgcctctaatgctaccgtgaatcatttgtttcttgtgtgttcagtgccacccttgtataactatcttctttctgcaatatcagtaatccaggatggaaatcatattgttgctaacgttttactgtgattacttttcaagtgtgtagaaaagctttggacactgcagaaggcaaaatgaaaggaaaagtttagatggtggtgagagaatggcatctttgcctttccctaggttatggttttcctaggagcccactctgctcttggaggcagaggatgtgaggccagatttgccccccttcctacagggcgaaataagttgagtaatgccacattatttamccaactaaactttccagtttcagcagtggtcttaaaactcacgggttcacgggtgttggtggagagaccttgatctcctctcggwtgggccctatgcagagtcctacgtcagtggatacagaattctagaatcctcatactgcacactcaggtagttggggatagataaatttgaggggtgggacaagggacgtttgagggccttggcatagggcctggtatgtattaggcattcagtaagcatttgctgagtgcatgggtgaagaaggcaacagttctgggaaagccagctctcaccgagcagtgtttcttacgtggaccaggtccaaagctggtggtgagataggtggttcccagagtgatgtcataactgataatctctctaaggcattcctgagcctgaagcgaggaagggctttctccacgtgcctccgtatttaacacttcggtagtcatctcattggttgacgtggtgccggagggtgacctattgatctaaaccacaagtactccaagaattttaatttttaaaaattttgtaatttaaggaaataaaactctagtttcttgaagggaagaattgaagcagcattgtggtaggggagcactgaaaccccattgcatcccccatctgtgcccaatttgttccaatctggcccttttttttttcttccttcattttctctccccctcttgttctctctttttcaaaaatgttttataattcctggaatcaaaaccacttcaggcacacactgttttattttactgtattattggattataccgcctataaatcactggatgttactcattggccaccactggaataacttcccttttctgtgccctggctccctctgttttcctctaccagtttcatagcacatacatccatttagctttgcagagaagccccggtggcagcaagagggcacccaagagacacttcttgcacgtgctattggtattgcctgcttttagggaatatttgggagctgggattaaggtagagcctgactggcattcctttcattatcatttatgcttgctttttttgggwggggggagggagggacagaatcttgctctgtcgcccaggctggagtgcagtggtgcgatctcggctcactgcaacctctgcctcccgggttcaagcagttctcctgcctcagcctcctgagtagctggggtcacaggcgcccaccaccacgcctggctaagttttgtatttttagtagagacgggggtttcaccatgttggccaggctggtctcgaactcctgacttcgtgatccgtccgcctcggcctcccaaattactgggattacaggcatgagccactgcacccagccttatgcttgctttgaatggtgttagtaatcctgaattacagaaggtagagggagtgtcacatgtgggtctccagagggagagagagctagctagctagctacagctgtctgtataggactgatagctttaacttgtaggtgtgggatgtttcatgccattgttgtgatgggaggtgactctagttgagtttggttcgcaaccgaagtgtccttgtcttccagcatacaacaatctcagagacgttcagaaaagcagtatgctcctctgtggtgattcacttctgtcgtgagtctcttacccaagcagaatgtatgaagtgcctaatcctccgcttgtcagaacagttgtacaggaaatccacctttcataaggggttaggcttgagttagctgtgtaaactggccccctcattcctcctcctacatctctggtggtagaaacccttgggctttttctctacaaggatctctgtgggtagatttcygtagggaatcrttgccacctgactttcattttcaggatgcctcagtttagagaaaatgaacagagccagcctgagcaaggaattttgtgagaagtagattcaaagtagaagtagattcaaaggtcagaataggttaggctttggaaggcaggccagagaaggatgcatgcttcagctctgccctctttccctgtgggggagatagaactcttgacaggccgcttagtgcagactgctctcggcactctctgcctgtggatctgcctgtagttccctgaagagaagtgagtatgtcaagggacccacctgtctttccacttctgggttccagggtccttgttttcagaatgtatttaggctggggaaggagaaatrrgaaaagccaaagaaatgagaaaattgtcatctcagtaaaattaagccttttatcatatcagttgaagaaatggtctttgttttgccccaagatagccatgtggtttggtgtccatggctgctttggtgtggagtgagagatgcaatatcccatgttgcccagatttcgtttcttttgccgttttatagcttgtcaatttgattgtttgtggttttcctytttttttttttttttttttttttgccccgacatggacttattctgaaggagraacattatttggaggaattttggcagcaggacacttttcttttcctttcttttccttttttttttttttttttttttttttttggagacggagtcttgctctgtggcccaggctggagtgcagtggcacgatctcagctcactgcaacctctgcctcctgggttcaagcgattcccatgcctcagcctcccgagtagctgggattacaggcacaggccaccacacccggctaatttttatatttttagtagagacagggtttcaccacatyggccaggctggtctcaaactcctgacctcaagtgatccgcccrcctcagcctcccaaagtgctgggattacaggcatgagccactgcrcttggcctggcagcaggactttcagctaccttttcagagctctaagttttgtaaatgtatagcttgggtgtgggtgtggggctcaggccagattcatactgtatgctgaattcacagagaaagtaggtatgttctagggggctggtgaggggtgggaagtgttgaactttggaccctaaccaagtaaatgcctatatgaggaagaattgtagttttcagagggcgtgaccagtaatgacaaccacagcaatgactccatgctctaatacatgatgacactttatagttactgcatatgtgttttcctttgattctcttgtcagccctgtgagacaggctggacagatattttgtgtcctgtttcatagatgaggaaaatcatatcagaaaggttaagcagggctgcacagctagtaaattatacacaggtgtcaagtgtccatcctttgatatcagaaaaaagaaaaagcttctctgggcagctagacagtgcaaggaatgtccccccaaatctgagcactgttgttctctgatgaagaaagtgacctgtgaatctgatctgagataggaagaggaacaggagtaaaggtaagagagttggggtaagtcagaattctctgagtggcgtgacactcaggtggggctacaacaaataagctagcagaaggttgttgtttgggcaactcagggctgtctggagttcatgttcattattgtcatgggtagaggaaacctccctctcacatggaaagcgcagtccatgactagttggtagaagtgtttactctttctcttggcttaggatacatagtgtctcttaaaaagggggtgggcggatttttttaaggagcattgtttcatattttcaccatcatgtctartatccctcttcttttagaaaagaggcctctcacatgcttttcttaggagagactgtgctactttttgtggcctggggggaaggtagatatgtcattgatacagaaaggagtgtgagagtataaaacatctgaaagaaggataaagtaaacacacatgtaactaccacccaggttaagaaatagaatattgtcagtccctcagatgttcctatgtacttcctctctgtatagctgtagttacctcaccaacaggtaactatcatcctgacctgcgaattcatttccttgcttttctttgtagtgttatcacctagtatgtatatatgtatgtgtgtgtatatgtatatatatgtaaaatataatttggggccaggcacrgtggcttgcgcctgtaatcccagcactttgggaggccgaggcgggcagatcacttgaggccaggagttcaagaccagcctggtcaacgtggggaaaccttgcctccattaaaaatgcaaaaattaggccgggcgcgatggctcacgcctgtagtcccagcactttgggaggctgaggcgggtggatcatgaggtcaggagttctagaccagcctggccaagatggtgaaaccccatctctactaaaaatacaaaaattagccctgcacggtggcaggcgcctgtaatcccagctactgaggaggctgaggcaggagaatcgcttgaacctggggagtggaggttgcagtgagccaagattgtgccactgtactccagcctgggcaacaaacagagtgaggctccgtctcaaaaaaaaaaagttagctgggcgcagtggcatatgcctgtaatcccagctactcaagaggctgaggcacaagaattgcttgaacccaggaggtggaggttatagtgagccaagatcacaccactgcactccagcctgggtgacagagcgagagtttgtctcaaaaaaagtcaaaataaaacaaaacacataattttgctttgcttgcatagagatggtatcgtgctaatcatactatttatattcttttctccctggtttattttattccatatgtttgcgagttctgtccatgttcatatgtgtagctgtagttgatttattttcattgcagtaatcttacattttagtcacattagtttatccatttttccattgatgggcatttcggttgttttctctttgggactattataagcattgagtctattgatggttactgcagttattggtaccttgagagttatatgcatcatcctatattttaaaatgaattttgttgaagtaaagtttacatacaataaaacacacccattttaagcatgcacttcagtcagtttgacaaatttacatgcccaagttactaaccatcacaatcaagatagagagcgtttccatcatccccagaagttctctttgtgcccatcccagttgatctccatcccaccccttgccctaggcgactgcttatctgctttctgtcaccgtatgttagatttgtcttttctagagtttcatgtaaatggaatcctaagagtgtgcactctttgtgtctgactaatgtctgacttctttagctcagcatagtaatttttagatttattcatgttgttacatgtatcagtatttcatttccttgcattactgaggagtctggatattgtgtagttttgtttatccagttacctgttgataaacatttgggttgtttctagtttttcactaktatgaataaagctgccatgaacatttatatgcaagtattttgtggacgtgttttcatttctcttacgtaagtacctaggaatggacttgccggatcatatggcatgtgtatctttaactctgtaagaaactgctaaactgttttctgtggtggttggaccattttatattccctccagcagtgagaattccactttctttatatccttgtcagcatttggtattgtcatttctttttattttagctattctagtaaatgtgtggtgctatttcattttggtttgtgtttctctaataactaaggatgagagacttttcatgtgtttatttgccacttgtatatcttctttggtaagtgtttacatctcttgcccacttgctttttttcctttttgaggtggagtctcactctgccgtcacagggctggagtgcattggcgtgatctcggctcactgcactgcaccctccgcctcctggatttaaacaattctcgtgcctcagcctcccgagagtagctgggactataggtactcaccaccacgcctggctaatttttgtatttttagtagatacggggtttcaccatgttggcaaggctggtctcaaactcctgacctcaggtgatccacccgccttggcctcccaaagtgctgggattacaggtgtgagcccagccccacttgtttgttttttttttgtttgtttgtttgtttgttttaagacagagtctcgtactgtcgcctgggctggagtgcaatggcgtgatcttggctcactgcaacctccacctcccgggttcatgcaattctcctgcctcagtctcccaagtagctgggattacaggcacacaccaccacacccggctaattttttgtatatttagtaagacggggtttcactgtgttggccagactggtctcaaacttctgacctcgtgatccacccactttggcctcccagagtcctgggattacaggagccactacgcccggctcttttttttcttttttcttttttttttgagacggagtttcactcttgtttcctaggctggagtgcaatggcatgatcttggctcactgcaacctctrtctctctagttcaagcaattcttctgcctcagcctccctagtagctgggattacaggcatgcgccaccacacccagctaattttgtatttttagtagaaacagggtttctccatgttggtcaggctggtcttgaactcccgacctcaggcgatccgcctgcctcagcctcccaaagtgcccacttgtttttttatcaagttgtttgtctttattattacgtcttaagagttctctctataacctggacataagcccttatccgatttatattttgcagaaattttctcckggtgctttctcattctcctgtctcttctgtttctctttttcttctgtcttcttttggatggattattgtttccattccaccgttgtcgtcgtgcccctactccttacccccagcactagtcttcttttcttttagggttaccctaggaattaaagcatgcatacttcaccttgccaaaatcaaaagttaatcagatttccattctcctcttaaacaatataagaaccacagaaaaacttaaaattttatttattaaatttattttcccaatttgcatgccatcgttgtcatgtatattcttttttccttttaaaccctataaaacaagttatcgttatttttggtttgatttatttggttttttaattattattttgacagtaaatatttgttcaaacgcacctatattttttgaggcagaggctcactctgtcacccaggctggagtgcagtggtgcagtgttggctcattgcaacctctgcctcacaggttcaagcagtttttgtacctcagcctcctgagtagctgggattacaagggcatgaccacacccagctttttctttttttttttttctttttttcttttttttgtatttttagtagagatggagttcaccttgttggccaggttggtctcgaactcctgacctcaagtgatctccccacctcagcctcccaaagtgctgggattacaggtgtgagccactgcgcctggccttaactcacctgtatatttactgttaaattcacttttgcatttcagaccctctatctgggatcattttctttctgcctgaagtatactatttatatttagaatgtatttagtgaagttcttttgaaggcaaatattcttcatttttttatttgtctgaaaatgctttattttacccttattccagtaatagaattctagcctaacagttacttttgctcagcccattgaagataggttactacatctttgggctttcactgttgttgattaaagtcagctatctgttttgtttctcttttgaaagcagcctgtcttttctctctaggtgctttccaggtctttttaaaatctttgatgttccacagttttggtgattggtctaggtttggatttttaaaaattattcctgcgaagtatttgtcgggcttcatgtaacctatgakgttggttggttggttggttggttggttggttggttttcctatcagttttggaaaactcttagtgttcttttttcaaagactgcatctccccatgctttctcttctccttctgtgaccctgataagacatacatcaggcttagtttttgatgtctcttaaacctttctttgatttttctgactcccttctttttgtgctacattccagataatttccttaactatctttcagttcattgaacctttccatagctatatctaaccttctattaaatatgccccattgacaatgtttttaattttaataaattttttatttccatatattttttaaatcaaatctgctttgactttctttatggtttcttatttcccaaatatacttgtgagcttgtcttttatttctctaaaatatattcaacatggcattttagagactccataatctgaaatggtgtatttggggtgtagccttgtgggaccctagctttatgataaggatcttggctgtgtccatgcagccttggaaagcaaagctcgagttcatcaggtagcaaatgttcttagggtaaaggctgtttgtaatgccacacttacctatctggtttcccatctttattcaatctctgaccaaaggattttcttttattttactagctcacgaatgcttttcaaaaagatgtttaacatactctttttttcagaataatgagctgtttgattgggagaatggatctaggtgtctagtctgccgtactaccagaggaagctgggatttccttgttccatcagacttactcagactttctttcttttcttttctttttttttgctctgcctgtgatgcccatgagcagtgtgactgggcacctacatccagggtggcaagggcatgtagtttgctcttccaaagattagtttcttttccagctcctgcccatttacagctcagtcttatggcaaatggtgtcattgggctcacattttttcatttttccaagaggtgtccagtgtatagaatatcacttagagggctaattgggtggggaagaaagatcaaaggagtggagaggaaaggctgcagctgaagtgataggagccatttattgacaaaaagatgtgagttagagatttggaaaagagtactctgttgtttcagctacatcacattatatatctggtgaaccttgctggcccatgaaatcctttccattagtcagggttctctgtgcttttgttcttgactactgctgttcttagtgctattcggtttgcttgtatgtctcagtttccttttcagaaggcagattgtcgtctatttaggaatgcatttactgtaattggagtgttctggcttgtttagtcccctcttcaaatataagactcatatcttgaagcttatgttcagaaaatatgcgcgtgtgatccctttgccccaagtgccaacagcagatgtagcagttgacacgctgcagggaatttccaactgctgggcaggtttctgaaatccggacacgtgctgttcacactttggcttctgaggsaaggatcagtggttgaaagaggggaggagctggcaggggactgcagggagaaagatcttataatgcctgcccagggctttaggctgtgtcagctttctgcatctcttctccagctggagctggcagggtcgaataaatcactgcagagtagttatgagcccagctcaccagggacttctttgaggcacacctgtgacgtcatcctgttatcactgtctgttccacataacctcttttcacctctcccctgagagagggtgatgcccagaactcatgtcagggcaatgagcagaggaaaatgtttcgtaagtattatttttcagatgcctgctagggatacagttgtaggccattgacacattcttcaatattcctcattggaagagaaaacctgtgtttgcaaacatggcctgaataccccttgtggataaaacttctttttaaacttggaaagaaagtcttgaaactcctaagtggtctctttttgtaccccttacctctctcgttccttcccaaacatgcacacacagacacattacatacagagtctgctgtgttcaaaatccttcactgacttcccatttcactcagtgtaaaagccacattatttacaaggccttcatatatggacctyttytcctgccccccccccccccccgcccccgcattgcctctctctgagctcattcacgactgttctccccatggcttggttactctgcttcagccacactacccttcttgcaagttctctgctaagctggggactctcccacctttggcccttcgcattagctgttttctctgtttggaatgttctgcatccagccatctgtctggtgaatacctcgcctcctataagtctttgcttaatgttacttctgtgagacctgcccyaaccatcctatttaacactgctgcattctactccaaacctgcactctttatcttccaattctattgatttattttctaaatactagataattaatgtgtatatgtttattatttattttcctctactattctgcaagaatgtaagctccctgctkataggggtctctggtctgttttatccactgatacattgtgaacatctaaaacagtccctgacctgttgtaacttctcagtaaacatgcgttatatcaagttcaagtcaaagaataatttgaggccaggtgccgtggccgacgtctgtaatcccagctctttgggaggccagtgcaggtggatcacttgagctcaggaattcaagaccagcctggccaacatggcgaaaccctgtctttactaaaaaatacaaaaattagccaggcatggtagtaatcccagctacttgggaggctgaggcaggagactggcgttaaccygggaggtggagcttgcagtgagccgagatcaccccattgcactccagcctgggcaacattgcaagactccgtctcaaaaaaaagaataatctgtcagcaggtcagcctggacaatgaagattgaatggcaagggcaggggcatctgttaactaggttaytgctcataatcttactgtctttccttgttttttgttaaggtgactttcttgaaagcataatttccaaatgcatattttacatctggcattaaagtaaaatccattaaatgtgctttggtatctactgttgtattaatcctttctcatactgccataaagacatacctgaggctgggtaatttataaagaaaagaagtttaattggctcatagttccacaggctgtacaggaaacatggctagggaggyctcaggagaatcacaatcatggtggaaggcaaagaggaaggaggcacgtcttccatggctggagcaggaggaagagagtgaagggggaggggctacagactttaaaacaaccagatgtcccgagagctccatcaggagatagcaccaggaggatggtgctaaaccatcagaaaccaccccaggatgcagtcacctcctaccaggccccacctccagcactggaaattacaattcatcatgagatttgagtggagacacaatccaaaccatatcagctcttaaccctggagtaaatatcattggggctctggaaagtaaatttctatagaacagcgtaagttcagtcctttctggtctcttgaatctttcatcttttactctctgtcctttcttcctaactagaaatacttttttatttccctactcatatatcatatttttacattcacctaactggagcaattctgtcctatttatgaaaactaaatgattttttttaaaggatttaacattttgggtttcattgaaagtactaaaaaaggtaaagtagaaaccaacttctggcagtgacattctttcctatacgatgtataaatattcaaggagtttttacacagttgaaaagatactgactatacaatgtttgattctactatttttacttacaagtatacaaagctataaaattctttgtaaacatttgtaatttacatacaaataatagtaatggcaaaaagtgcaattacttttgtaccaacctagtataaactgaatcatgttctcatatgaatgtttttattgttatgtatattcactgtgttgcccaggctggagtacagtggcatgatcatagctcactgcagcctcgaactcttgggctcaagtgatcctcctgtctcagcctcccaagtagctgggactacaagcgcatgccactacgctcagctaattttttattttttgtggagacagggtctcactgtgttgcccaagctagtctcaaactcctgggtccaagtgatcctccttcctcggcctcccaaagtcttgggattacaggcatgagccgctgagcttggcttcacatgaatatgttaactttcatttaatcattaccctctttttgaacattttcttctcaggtttctagtattataaataaagctgtaattaacatctctgtacataaaatttttgtctgcgtttcatgttgttttattagaataggccaagcgtggtggctcatgcctgtaatcatgcaggcagatcacttgagcccaggagtttgagaccagcctgggtaacatggcaaaaccccatctctacaaaaaaatacaaaaattagctggatgtggtggtacatgtctgtagtcccagctacttgggaaaattataygggagaatggcttaagcccaggggttggaggttgcagtgagacgagatcatgccattgcattccagcctaggaaacacagccagaccctgtctcaaataaataaataaatactatatttttagaagtwtggttgttgggtgaaggggttttggcatcttaatacttttgatacatgatgctagattattttttcttttttctttttcttttcttttttttttttttttttgataaagggtcttgttctgtgtcacctaggctggagtgcagtggtgtggtcatagttcattgcattcactgcagcctcaagcttcttcttaggctcaagcagtcctcccatctcagcctcccaggtagatgggactacaggcacgtgctaccacgcccatctgattttcaaatattttgcagagatgaagcctcactatattgcccaggctggcctcaaactcctgggctcaagcagtcctctcaccttggcctctcaaaatgcgctgggattacaggcatgagccactgcacccgacctaggttactttttgaagaaggtgtatcagcttacactcttagcagtgtttgagaatgtccagcaaccaccttcctgtagacattaagcattttatttatcttattttgttttttatttttgaggcagagtctcgctctgccgcccaggctggagtgtgttggcgcgatctcggctcactgcaacctccacctcccaggttcaagctattctcctgcctcarcctccgatgtagctgggactacaggtgcccgccaccacgcgtggctaatttttggatttttagcagagatggggctttgtcttgttggccaggctggtctcaaactcctgacctcaggggatccacccacctccgcctcccaaagtgcggggattacaggcatgagccaccgtgcctggctgcattaagcattttaaattttttacagtctttggcacaatgtaggccttcatgtatttgttgaataaatggcagaataaaacctgtccttttaaaaaatagactttacattttaaagcagttttgtgttcacatcaagattgaacagaatatacataaaattcccatgtacctcttgtctcccacaacataaaaacttctccgctatcaatatcccacaccagagtgggacatttgttacagtcagtgaacctgtattgacacatcatcacccaaagttygtagtttacattagggttcactctcggtgttgtgcattctgtgggtaactagcttatttttatacatcactctgagtgagtaagtttggagtcatcatggactacattgtcagggttaaatctttcacctcacctcaggtgatgacatgccagcacctcaggtgatgagtagctcaagcttggaaggttggcatgggtatgtaggtgagtagtcttgttggtttgccattacagggaggaaagaatgtggtttccttatttggttatctttttttttgagacggagtctcggtctgtcgctcaggctggagtgcagtggtgcgatctaggctcactgcaagctctgcccctgggtccacgccattctcctgyctcagccttcgagtagctgggctacaggcgcccgccaccgtgtccggctaattttttgtatttttagtagagacgggatttcaccgtgttagccaggatggtctcgatctcctggcctcgtgatctgcccacctcagcctcccaaagtgctgggattacaggtgtgagccaccgcgccyggcctatttggttatcttatttttttactaacgaatgaattgtctgcaccataacagaatgttatgggagaagcacatcattcttttggagtaaaagctcttggattaaaccttctattgagctgaacagcaagagagtaggctgtctgtgggggctcagggtgccatactcagccagacatttaaacatttaaatacaggtgttacccatctctgatggtccttttcattgtttttttttttgtttttgtttttgttttttgagaccgagtctcgctgtgtcgcccaagctggagtgtggtggcacaatctcagctcactgcaacctctgcatcccgggttcaagcgattctcctgtctcgccctcccgagtagctgggactacaggtgtgcgccaccacacccggctgattttttttatttttagtagagacggggtttcaccatgttggccaggatcgtctcgatctcctgaccttgttatctgcccgcctcggcctcccaaagtgccaggattgcaggcgtgagccaccgtgcccggcggtccttttcattgtttattctttggctctggaagtactgtggaaggtggctgaggggagccagtgcacttggctgtcttgggctctaggtgatgtgcaggaggatggtagagggtaatgagatatttttaaatttctttgctttaaagagttcagagagaagtgtaaagatggaatagaaaaatcctgcccagtttagagttggaccatgactcttctgttttctggtggttgggagtggtcagctgccaaaaatgtgatctctgcttttcctgaagaccgtgtggcttcatggttatgaactttgcaattgatcacattttggtaaaataatatatattatacatatattaattttaatagactgatggatatccatcaaaacttacccatgattctctaagatggtagaattaaacatgttttaaattttcttttttctctgtatttttgtagttttctgaaattatcacaatactttagtaataatgtattgtgtaaatgtatttttaaaaattataatgataaaaagaaatatttgaaattagataaaactaggttctaattctgattgtttacttgctgtgttatgcaaattacttaaccatttccaaacctgtttctacgtccagtaccttgtggatggaatacatttaataaatgtttgttgaattaaactttcctgccataatgtgttcgccactgattgccagtgtttctccccttcccataaaggaagattctgtttcttattttgaacttgaatttcaaaagaagcaacttaggttttgagggtataccagttgtcttgtttttttttgacattttgacattactgattcttctaactcttcctgcattccagaagaactaacaacctcatagatcaattagggaatatttagctcatcttgaaaatggaattattttagcttcataaaatgcataaatccctcaactagagtatgtctccatggggacaagagactatataatattttagcaaattcctaacaatgttcaaggctaactccaaaattagatgcttattctcacaaaaaagggccagaaattttgaaaaagttaggtgcctaatcagtgattgattgattgattttctaaggtctgaaaatgtataaagagtttaggcaaataagaaattaacagattgttgatttaaaaaaattatgtcttataggtaagtawttgtgccttgcaaaatgttaataccttagaattatatttttaaaaaattctgtaagacttccatgatgatgaagtcatcagaatccctttgagatggtaatgttacagtagactgctttgagaaatcacggtttaaatcttcagcctactttttcccccccttttcttagccccaaactgtggggacctctctctctccctctgaagacagtagaaagccaaatctgtaaaaaaaattcctattacctcactaatgctcttgaccccattccttggataccttggttggtcccttccaagggagattggggtagctgctttaccatcgtggtacctgccatcygagtttccaccttgcccgagatccctgaaggccaaaaatttctgcctactgggaagaggcagaaatacctctatgtgtgcgctgtttctttaaaagaaagtgtagcggaagtgatgctgcggggaacatctgcactcagggctgagggagagcgcgagatgcactgcagctggtgtaaggccctggcaggctgaggcgctgctgtctataggggtttacttctgtctgcattgaaacatggcttgggaaggggttggtggcctgctgccagcctcggttagcctgcccttctctttcctctttcctcctcgccgccccccacccaccctcactcccctccctcatgctttaaagtcgcatttccaggccagacgtagaattaatctctgggcacttcacattgctggcagctgaaagcaggatgtgggatctttttttctctctctttctctctctgcgtcttggctgacttttttacctctcgaagaatttggaaggccgtgagatccccccccacacacacaagtactgtggagtttttcagcacgctgatcaccctgctgcggcttcaccctaatagacttcatatgttgatgcagttgacatcagtatcaaactattttacatgtgatctggtgtatttcctgaggaaatctgcaagatatttattaagaactaataaaataaacctctccatgagtttttaggtagttttcaatttttcatgtctgtctcgtttcctcttatcaatgagttgctattttctctctctactctgaccatcgcaaaaggaaacaaaaataaatgttttaaactgttcctgaagggacagagagagaatagttctgccatgatgtatcagccgggactgtatttttagtgcagcattgtagaaactaaaaatatcctgttatagtagatcctttttataggtctgtgtgtgtgtgtgcgcgcgcktgtgtgtgtgtttataatgtacgcacaagtgcctttgtgcatcagcagccactcttcacattacagctggactccattagtccttgaaaattaatgtaatcctagttaagaaaaaaattaattactgtaccagagctgtgttttatccaaagctagtgttagctccctagctggcagcttagtttgagaggctccagggccccgtggagttgtggctttggtatcgcagcattggctgctgtgtttttcctgtcgagagcattcctcagttctttagggctagacatgtggcatgcagaaagtaaccacagacccctctgcctcagtgaaatattatgttccagtctggtcatcccccaaaatggtgtccgtcacaggtttcactcacctgccatagcaggttttcttatcaggtttctttccaagagagctacttcgacagcggtatctctgttcatgttcttgagaggagaaataacatttatcaaagtccaggagacacatggaatttaaccgggaggattttgcatggacaattaagaatgacagtcacattttgcccttactttttgyttaaggatttgactagtttgtttaatatacaccttttattataaatgagtgtgtcagcgttgactgccggtttctagtcagacttctcagcaccagccctgggtgaggggctgactggctcagcatgtgagtaacgtctccagctttgtcatcagtgttctgggaagagatacggggcacagccgagaagccgttgccgtccacctcgccttcactctgcagctcttgtgcaattgcctgctctgttgttgtttgtttttcttcttcgggagcctggattggggtgggggggattgagagtggggtaggtaggaagattgctgtttctttgctggtcagactctccaggctctctgcggagagtccaggcaggatctgtctgacttggattgcagttctctttttctgctgagctggggtgtgggcagcctaggcctgtgtaactcgtgacaggcctcccaaagtgccatgatggcatggatcctcgtggagctgttgagaacaaaaacagggttagtgaccttttgtttctttttgggcatgggttctgagacttatctctgggccttatgttcctgctagtgactctaggtcccccggtcctctccccatcatcccctggctgacaaatggttgaactctcagcttcctgtacttgatccccaaacagtgtagttcagtaaaagtagtaattagggcttttacaaatttattttattagtgaagagagttggtaggtaatgggctgtaattctaacacagccagtttggagattaataaaaaattttaaaagagcagtttttaccagaggcagtgggcccgttatttcaagttctcggctgagccgaaatcagagtggggtgggatccgtggtagactttgttgctgggaggatgcaaagccacgttccttgttgttacagtctgtgcagtgcccatccttgagggtgttttaccctggcattggaaaaaaggaaaccttgttttccaagaactctgctctctctcagcttgataagcatttaaaaataaaagctgcacaattgaaattggcagtgcatcctcattcttttgtctctctgtttatttttttccctcatccctcaacatgtgtgctacagcccatggttattacaccctcaagaatgatggcctggaactcagcaaactcgcaccaacgtctgcccgccctgcattctgttgtttgaagctggctgcggcatcagggcctagcgctgagaggccgggtggatcagcctccacagctccatctgtggcacatttcccttctctgaagctgctgcttggaattttgagcttctccagaatcctgattgtcagctcaatctttcttgttagtttttgtagttaacttaattgatttgtttacctctccattggaggagctcaaaaagaaagtgctttggcactcagcagagcagttctgcctcttgaaaagattcttctgaggtagagttttataatactgacccagagaagaaaaaagatcctatggtttaggccagggtgactgtaagtcctggtttgcccagggatggatcctatttatgaattactcatagcacaccccttcactctcggaagtatcccagtttaggcgataaattttagcatcatgctagcttagatgaattcagcaagaaataacagataacccactcactacaaactgttaattctttgtctagaaatgtaatggcttcgtgaggcagcgccaaaccctgccctgagcattgcatgcagattccactggagtcatgcacatgtgacctcagaaagcattgctgtgtttctggctctgtgagtgtggactggccttcccgcttgagtaggtcccggttaagccaattttgaaacatgtcacttatttgagcattcctggttatcactgcctagttggttgagtcagaacctggagttagtttggtagggtgtggtttcaggtttgcagacatccccggttgatgcctatgaagggttggtgcctgatgtaactgaatasggtgctacttcaggttagtagtccttgttttctcttgactggttggactgaacctggtattactgtttaccaaagaatatttttggtttgaaaactgaaggtcagcagttcgcaagtgccgaacgtaaagccaactctgtggtttgtcttgtgccactgggccagcagcactgcagtcctgatcgattgatctgcagcaatataaaaccacgaacagcaactgccagacaaaactccatctcaccccatttccctgtccaacctgtctctctgcccagatcccctttctttttcctcgtatgtctgtctcactcttgcttatgtatttcacttttttgggtctatctttttccatctccctgtctctttccataacagttttaataatgttttagttagttccagccttttcgctgaatggatcccattggaaaatgcatttgaaaggaaacagttatacacttcccttcctttgaaactctgttggcaccttttccagtgcagtaaaccatacaacatgtattttcaaagtttccaaacagacacgctggcattaaatttatgaaaaaatattcagctatatggtaactgtgactttcagagatgctgatcagatttgaaattggtactgacttctggagctccagcaggttttcagatctctgtgggaaatataaccaaactggctcttggggagtctgtgatgcttggagccttggcttttgattggcaggttgggcaggaagagttggagcgagagatgtggatgtggggatccccagccacacccagagggaaacagggaaggtcagtgagtcagtgaagaatatggcatagccgtgttgggcacagtaacagaatgtatattccttctatgtgtctatgcatagaaggtaaactactttctgtttattccagccaagactgaaggtcaaagaacgccctttttttttttttttttaattagatggagtctcgctctgtctcccaggctggagtgccctggcacgatctcggctcactgcaagctccacatcccgggttcacgccattctcctgcctcagcctcccgagtagctgagactacaggcgcccaccaccacgcccggctaattttttgtgtttttagtagagacggggtttcaccgtgttagctaggatggtctcgatcccctgacctcatgatccgcctgccttggcctcccaaagtgctgggattacaggcgtgagccaccgcgcctggcccaaataacacctttttgttattttctttagggtgccaaggctaagaagagttatttattttccttcaagtcagtaatgatgttgctattgttaaaaatgtttacctcccaaaaaatgttctgaagcaaaaatatatatatgtattagaatttgtctatgtattttttcttattttttatgattgttaacttctttttttctttcacctttgaactgttgtccagtctaagacatcctgttatagcatgttctatgtatcttttttctatttttttttttttaataaaatccagctcctccaggaagttctatgtatttgaaagtccatcggtttgactgaggttggaatttggtagtcaagcatggtgatccttctcaagtaccccggcagtttgttcaggagatccttgggaatgctcttgaaagaagcctttcagaaggggatttcttccagattgctcaagcagaagctaatctgtgtcttggcttacctaggtgtaaaagctgagcatcctgcaggtcatgtatcccactcagttagttaacaagggtttgttaagcactcattatgtgtctttcttcttagctcttagcttgcttttttttttattttatttttttttaaagcttttgcctttgttggctgcagacagcatttccagaaatgctgtatctgttttctctcggtttgctcatcctctctgcctgtttcttgggtttcctctttctcgtgcagcatccagtatatcagcattaactaaagatactacgtttgccctcctctttctctttccccattggtgtattgtaaaatcttgtcgtttcaactgtcatctctgtgcaccctcgcaaaatttctttactgccctgatctttttcatgaactttggcccacatttctaactttttgttctatattttcacctggaatcgcaagtttattcaaaattgactcatccatagctggtttgcagtaatgcacaccagtagtcccagctactcaagaggctgaggaaagaagatcgcttgagcccagaagtttgaggccaaactgggcaacataatgagaccccatctcttaaaaaaaaaaaaaaaagaaaagaaaagaaaacggttcatcctctccctcacttgtcaagttccccccaggaagcagactgtgaagatggatatttgcatgcaggaagctggattggggcagagggagaaattgaactgtgttgcagctataacaaagggcttacccagtccagcaaggagctctggacctaggctaacctttccaagtactcccaaattgggtcaaaggggctgagtctttataccccctctctctccccaccaagtagttggatgtaggttacctgggaaggtgcggtgatttgggggaagtgcctttctttagctgagatcaagtctcagtgaaggtctcagtgaaggcctctttctgtacctgttttctgtgtattgcttgcctctctgaccctcttccctgcctggcatatagtaagggttcagtaaatggtagctttaattgttgtgtcacttttgtatacatatatttttacaaatagagctatcttggctgggcacggtgcctcacgcctgtaatcccagcactttgggaggctaaggcaggtgggtcattaaggtcaggagttcgagaccaggctggccaacatggtgaaactccttctctactaaaaatacaaaaatttagattgggtgcagtggctcatgcctgtaatcctagcagtttgggaggccaaggtgggcagatcacgtgaggccaggagttcaagaccagcctggccaacatggtgaaaccccatctctactaaaaatacaaaagttagccggggcgtggtgacacacacctgtagtcccagctactcaggaggctgaggcaggagaatcgcttgaacctgggaggtggaggttgcagagccgagatcgtgctactgcactctggcctgggcaacagagcaagactccacctcaaaaaaaaaatttttagctgggcatggtggcgtgcacgtgtaatcccagctacttgggaggctgatctcttaaacccgggagacagaggttgcagtgagctgagatggcrccattgcactccagcctaggcagtagaggggagactccatctcaatacaaaaccagaaaacaaatagagctgtcttacatcttactctcttgttttgttttgtttttttgagacaaggtttccctctgtcatccargttggaatgcagtggtgtgatctcggctcactgcaagctcctcctcctgggcttaacccatcctcctacctcacctccccagtatctgggaccacagacacatgctaccatgcccagctaattttgatggagtctcactttgttgcccaggctggtcttgaattcctgagctcaggcaacccacccacttcagcctcccaaagtgctggggttacaggcatgagccaccgcacctggacatgttacgctttttaacggctatctatcccacgatacgtgtgtaccataattttagtggttttatattcatgtttgcaacctttttctgtccaaactatatcaacagtgagtttcatcattcacgtcatttcatgcctctttaaacttcttaagagatttttcactttcttctttgatttatagttgatagcataagcaagtcctgttagacttcagctccttgaaggtccagtttatgtctgattcatcttcaaaaactaagtgcccagcacagatccttacttgtagtagccacttggtgaatgctgactgtgtgaatataaagaaacgaattggttcagcaccatgtgaagtaccgttcagatcagcttcaacacccaggcgctgcagtaagcacttcagatttggtggggtctgcgctgtggacccctccctgttgggatttctaggctagtggggcagcttggtgaattgtaaatcctgtacgaggacagctgtgagcccacatacctggtgagtgttacagtatttctacaggtagaaatactgccagaatccagaggaggaggcctgtagtacaggtctgataacatgctggatcttgaaggaacgacttaggcaagggagaggaaagacgtaaactgtggagagtgggggtaggagaatggccattcaggagtgtggaggcaggtttgctattttgtctcttgactgtggtcattcaccatcttttgatgtgggaccctttatttatttatttattttagagagacacggtctccctctgtcgcccaggctggagtgcggtggcacgaacattgctcactgcagcctcaaactcctgggcttaagccatcctcccacctcgacctcccaaagtgcttggattacaggcatgagccaccgcacccggcaagtgtggggcccttttaaagaagcaaggcagtggtctataaataaacctgttaggtcttttgagccaggcagaagcaggtcagttctatcctctaaatggaggaagtctcaccaagaaaataaagttgaactggtgctttaaaaactgtctgtttggcagggggttgctaatcccacatttatggagctttgttctcgctaccagtgttaaaatataaatgtagcttttaaatccccttgctttatagcatactgttatactttttgttgtagaaatattccaaaaatgtgcctaaattaaattttacaatctagacaattccccctttatatccatacatttgtgtttatatatgtatatatttaattatagatattttaatatatcattgatctttttaaaacaatcttttctagtgtatgtcactttctcatttatctagagtttttctttaggactttagagttcttcattcctcattctggatggatcgttcatgatcagctgtaaagcatttttgcatttgggtttctctgacccttagtcagaggtgtcatgtacagaatgttgactaaacaactgcattagatagcaggtatccctctatttaaagaaacccatcatggataattttgaaataaaactgatcattttctaatttagtggggttttttgtttgttgtgttttgtttttttgagtcacagtcttgctctgttgcccaggttggagtgcagtggcaccatctcggcctcggctcactgcttcctgagttcaagtgattctcatgcctcagtgtcctgagtagctaggattataggcatgtaccaccatgcctgctatttttttttttttttttttttttgkatttttagtagagacaagatttcaccatgttggccagcatggtcttgaactgctggcctcaagtgatctgcctgccccggcttcccaaagtgctgggattataggcatgagccaccgtgcctgacctattgttattttaatttagttttatagatctttttaaaaaatattttactttcatctttatttgttttattattatcattatcgttattattattattatttgagaaggtgtctcactctgttgcccaggctggagtgtactggcacagtttcagttcactgtgacctccgccttcagggttcaagcaattctcctgcctcagccttccaagtagctgggattacaggcatgcaccaccacatccagctaatttttgtacttgtagtagagagggggtttcaccatgttggtcaggctggcctctggtcttgaactcctgacctcaggcaatccgcctgccttggcctcctaaagtgctgtgattacaggcatgagccactgctccccgccaaattttattattttttttagagacaagatcttgctttgttgcccaggccagagtgcagtggtgtgattatagctcaccgcagccttgaactcctgggttcaagtgatcctcctacctcagcctcgtgagtagctggaactacaggagcatgccaccttgcccaactaattttatttatttattttttttgtagagatggggtctcactatgttgcccaggctggactcaagtgattctccagcctcggcctcccaaagtgctggggttaataggcatgagccactgcatctggcctatagagcttcttaaaacaccatgtatctatgaatatgtaacttattcctatatatgggttttggaaaaatatttttagaattttatatatatatgtattttgtttcaccatatagataactttaggatactatttttggggtatcttttaacagcatgtgataagaggctgtgtgttataaaaaatattttcaggctgggtgcaattgctcacgcctatgatcccagcactttgggaggccaaggcgggtggatcagttgaggtcaggagtttgagaccagcctggccaacatggttaaatgccacctctactaaaaatataaaaattagccagacatggtggcacacatctgtagtcccagctactcaagaggctgaggcacgggaattgcttgagctcgggaggcagaggttgcagtgagctgagattgcggcactgtactgcaacctgggtgacagagctagcatctgtctgggaagaaaaaawatatatatacacatatatatttatctatatatctgtaaggttattgttcacttttttcatatactatctcttgcatagagtccatgctttaaaaagttattttagaactcagtgctgagaaaaaggagttgtttttcctgaagaattgatatacttattcctttctaataatgagaactatacagttattggtgtttcctcttttgctttgcctgacaggaaattttaagtcaaattttaagtccgtttatggtaggctgttaatccatgtgattgacatttttacctttttcttggtcttgattctctaatctactttaatgttatctcattttatgtgattttgctgtaagttgtcacaaatcttttgtgaattgtggtataaaagagtaaatataaaaaattttaatctagtttaaaattagatacaggccaggcgtggtggctcacgcctgtaatcccagcaatttgggagtaattgctgtaatcccagcaagatggacggatcacttgaggtcaggggttcgagaycaggctggccaacatggtgaaactcaatttctactaaaaatacaaaaattagccagacatggtggtgagcacctgtaatcccagctacttgggaggctgatgcaggagaatcgcttgatcctgggacgcggaggttgcagtgagctgagatcgcgccattgcactccagcctgggtgacaaagcgagactcagtctcagaaaaaaaaccaaaaactagatacatacargtttcaaacaatgtatattggtttcggtaagtgtattgacaaattgaccagtccagcaactgagtacaaatttggaagggctatgttactattaaggcagagttttactctgttgcccaggctggagtgtagtggcatgatctcagctcactgcaacttttgcctcccaggctgaagcgatcttccttcctaagcctcctgattagctggggttataggcacgtgccactacgtctggctcatttttgtatttttaatagaggtgaggttttgccacgttgcctaggctggccaggaactcctgagcttaagtgattcgcctacctcgcatcccaaagtgttggaattataggcgtgagccaccatgcccagctggaagcattattattaaaaggtatgtcgattccacagcttctaggtcaggagactagctggcaccttagcacatttctagtcaccttcattcattgctgctttctcacttccttccttggcataactgctttatctagcttattattctcctgacctctactttaaaactagatgcaccacagtgggtggggttggatgaagtcattacgttcgcagtttggtttggacattgatcatggattctgaggccttgaggaaccattttgggatgagtttctggagcagagtcaaatgaatgtgcagatctggatattcacaaggtaaccaccaaaaaattgtgccttatcattggtcttatttttcagtactgacccctcaaagtttgtttgatgactctaatctttacattctggaagcttcctgaaaaagctaacttctcagaaggcctccaagaggtcctttttattctaggtacctttctgtctcacctatctcggaattgttttatttttggcgttgtttacaaacactgtcagacttttaaaaatccttagctgggcatggtggcacatgcctgtggtcccagttacttcagaggctgaggtgggaggattgcttgagcctgagaggtcaaggctgtggtgagctatgaccatgccactcaactccagcctgggcaacagagcaagaccccatctcttaaaaaaaatcgttcaggaagccacagaatgaaaagaaattgagttaatttgtaaaaatggaagcagaacacttccctgcccctctgcctgccctgtcaatggagtttctctgaatcagggtgtctgcaggcattatccctccctaatttttacttctggctcaaagtgctcctgaagcttcacgccagcagaggtgggtttcaaggtgtgtgtctgaatcagcagccaaatctctccttgctttattaaaagtgatatagctatatttctccctcctgactgttaacaggaaaacttccttctagattggctaatgggtatgcctcttaggaagcctctttcatatcacttctcctccacaaccttaaataacttttgacacaggacacctcatatctgctgtatgggattccatagggactacctgtcttgtttaattaaagacctgccatgcttttctactcttcctttgcttttcctcaaatactgggagagaggcaagcttcccaaaacgtctggcaagcagtgtagaagcagaaactctgtcctgcaagatctgcttgtaactcttccaaatgagatgctggaatggcaggccctcgttctcctgggccccattactaagggactcgtccagtgccagcatgctattctgctggcagcagctctgtcctgcccaagaggggatgtgtattgaataactctgggctcagacagtaacctgtaagtaacaaaaatatcaatccagagacacaactaaggtggaaatggccaaagtgtgttttgactggcaacttacttatttatttattttccaggaaatctattggagtaccatttctgaaactgcatgggtatttcctggaacaagggaagcacccatttagaagtgttttcattttttcttgtagagagtagatggtttgctgtctttcttgccaagatgtattgatagagcccccaggacatttcttggccctggagtcctatataaagaagaagggaaagccagggtgtcctctggagggggcctagcacttctggagatcattgtctcacctgcagaaggcagcagctgtgtggtaatgctgtacagagctttggaatcaacctgatggagggcgagaattctctactcagccacttgccagctgtgtgaccttgatgacgaaagtttacttaccgtctctgaggttgagtttctttgttcataaagcaggttatcagtgccaattctcaggggttttctgagtgttagataaaatacgcaaaacaccttgtccaaggctttgttacctactgggtactcatgtatgtctacttttctttatcaaattagcctccagttatgaactcttaacagttcaagtgaagggtcagactaatgtgtttctaaatgtcattactctatttttttttttcctttttcagacacagtcttgctctatcacccaggctggaaagcagtgatatgttcttagttcactgtagccttgaacttccgggctcaagtgatcttcctgccttagcctcctaaatagctgagactataggcacctgccaccactgcaggctaattttttatttttttctgctagaggtagggtctcactgtgttgctcaggctggtctcaaactcttgggctcatgtgatcctctcctcttggcttcccaaagtgctaggattacaggtgtgagtctgtttttgacattcgaatgattaagtagtttattcctttttattgttgaatagtcctcactgtgtggatataccacaatttatttatccattcacttgttgatggatatttggtgttttctcctccagtttttaaccttcatgagtaaaactgctatgaacattctttgcgtgcatgtatgctttcatttttagggagtaaatacctgtgagtgatatagctgggtcgtttggtacttaacttttttttttcctttgagatggagtctcgctctcttgccccagctggagtgcagcggcatgatctcagctcactacaacctccaccttctgggttcaagcgattctcctgcctcagcctcccaagtagctgggattacaggcacctgccaccatgcccggctgatttttgtatttttagtagagatggggtttcaccatgtttgccaggctagtctcgaactcctggcctcaagtgatccacccaccttggcctcccaaagtgctgagattacagccatgagccaccgcacccagcctggtgtttaactttttaagatactgccaaagtggttatattatttaacttttttttttttttttgaatcaagtctcactttgtcacccaggctgtagtgcagtggcgtggtctcggctcactacaacctccacctcccaggttcaagctattctcctgcgtagttggcattacagtgcctgccaccacgcccaatattttttgtgtttttaatagagatggggtttcaccatgttgatcaggccagtctcgaactcctgaccgcaagccatccacacacctcagccttctaaagtgctggggttacaggtgtgagtcactgtgccccggtctcatttaacattgttaaagcagtgtgtgagaatttcagttacttgatatcctctccaatgcttgttattgttcatccatctgttttattattgccatgctgttgggtatggagttgtatgtgtgattttgatctgcatttccctaatgattagtaatgttgagcatcttttcatgtacctacttgccatccatatatcttctttgcccaattttttatttattttgctgagttgaaagagttctttatatacctcagttctgagtcctttgtcagatgtatcttttacaattattttctcccagtgagataattttctgtagctttccttttcattttgtcttttgaaaagcaaacatgtttgattctgataaaatcacctactttttagaaaatgtttgatttgtaattacrgatacattggcaaaggggctatttatcagagtattgcagttgatgctgscaattaaaaaataaataatgggccgggtgtggtggttcacacctgtaatcccagcactttgggagttcaaggccggaggatcacttgagttcaggaatttgagaccaggaggttgggaggccgaggtgggaggattgcttgaacctggaaagttgaggctacagtgagctatgattgcgccactgcactccaccctgggcaacagagcgagagcctgtctcattcataaataaataaaattaaattaaattgtgtgtatgtgtgtctgtttgtatatatctagggctaggtgcagtggctcatgcctctaattcttgcactttgggaggctgagacaggaggatcacttgaggccaggagtttgagaccagcttggtcaacaaaacaagaccctgtctctacaaaaagttttttttttttttctgtcgtgggtttgggggaaggggagggatagcattaggagatacacccaatgtaaatgacgagttgatgggtgyagcacaccaacatggcacatgtatacatatgtgacaaacctgcacgttgtgcacatgtaccctggaacttagagtataattaaaaaaaataaggaatacagggcttaaattcacgtttttaaaaaaggtatatgcaggttgaatcccttttagtctccacttttcagcaaagtttacctaaaataaaattcatttactgctggcacttaaaaaaaacaaaaagttttttttgtccaggcacggtggctcactcctgtaatcccaacagtttgggaggtcgaggtgggtggatcacttgaggtcaggagttcaagaccagcctagccaacatagygaaacccatctctaataaaaatacaaaaagtagctgggtgtggtggtgggcacttgtaattccagctactcgggaggctgaggcaggagaatcrcttgaacccgggaggcagaggttacagtgagctaagattgtaccactacactccagcctgggtgacagagtgagactccatctcaaaacaaacaaaaaaaacaaacctttgttttttgagacagaatcgtgctctcttacccaagctggagtgcggtggcacaatctcagttcactgcaaccccgcctcccgggttcaagcgattctcctgcctcagcctcccaagtagctgggactacaggcacacgccaccacacccggctaatttttgtattttttgtagagatggggtttcgccacggtggcccacaggctggtctcgaattcctggcctcaagtgatcatccgcctcagcctctcaaagcgctgggattacaggtgtgagccactgtgcctggcctacaaaaatatttttttaaatcaaaattaaatcttttttatttttatttatttatttatttatttatttttatttatttttttgagacagggtcttggtctgtcacccaggctggagtgcagtgacataatcactccacaatactgcagcctcaacctcctgggtctcacactgtattgcctaggctggtctcgaattcctgggctcaagtgatgctcccacctcagcctcccaaagtgctgggattataagcatgagccaccatgcctggccaaaaataaataccttaatatccatctgattgataatccaaagcaacaccaaaaatgcctaagtagtttcctttatgaagaaaacagtactcagactcatgtttgaagccgctttttcctctgactgccctttcttgaagaatgtgcataccattggtttgagatgtgtaccttatttttgagaagcaagaasattttttaactgctcgctcagtttctgcaattcattcgtcatctttcttcactttctcatcaccttcatcttgtgctgcttgctgtggaatttactgatccagtgattcacggccttgacgatgacgttctcttgctatactccttattctttagacagaagttctgtcttcagtgaacttttcttttttttttttttttttttttttaattttattttattttccttctggttgcccctgacagtttcttgtgtaagctggtgaggagccgcaactgggcatctccaccagctcaggccaggcagcagaagatgagaacaaggggctccagcatctggacagggtaatcagctactgttaattgagaaagtatcccccaagtgactgagtaacccttttctgtgtaaaactttctggaatgctgtgtcagatcttcttcggttttacttgggtttactttttttgttgtgtttacttgtttaaagctttttattttgaaataattatagattcacaggaagttgttttaaaaatgtacagagaggtcttatgcacccttcacccgtccttccccatttttcatgtcttgcatagctttagtatatatcaacatcgtgaaactgacattggtatccactgactttaatcagatttcacaagttatcttgcacttgtgtgcgtgtgtgtgtggggttctgtgcaattttatcacacatgtagcttcatgtaactattactataatcaagatgcagaactttcccaacactcaaagctccttcctgctctatgctttagaaccatccctaccgcctttcagcccccaatcctaacccctggcaaccactaatctgttttccatctctataaatatattatttcaagaatattatatagatgggattgtacagtatataaccttttgaagctggcttttcactaagcgtaatttcctggagtctgtccaactcactgcacgtattggttgttcattcctttttattgctgagtagtattccctgtattccctggtacggatattccacagttgtttaaccattcacctgtggaaagacatttgggttgtttctagtttggggccattatgaataaagctgctatgaacatttatatactggttttttttctaaacgtaagttttcatttcttcaggataaagccccagagttcaattgctggatcatatcataagtgcatttttagttttaraagaaactgccaaactattttccagagcagctataccattttacattccatcagcaacgtacatgtgatccaatttcccagcatccttaccaatatttggtggtggtactgttttttattttagccattctgatagatatgtaatgagatctcactgtagttttattttccatttccctaatggctaattatattgaacatctttgcttgtgcttattttctatttgtatatcctctttgatgaaatatctggtttgtctttttttttgcccattttctaaatgtattgttgttttcttactgttaagttttgagaggttttttgttttttggtttgtgtttatttttctttatgtgttgttttttttgagacagggtctctgtcacccaggctggagtgcagcggcactgtcacgggtcactgcagccttgacctcccaggctcaagtgatcctcccacttctgcctcccaagtagctgggactacaggcaaatgttaccacatccagctaattaaatttttttttttttagagacacagtcttgctatgttgccagggctggtctcagactcctgggctcaagcaattctcccaccttggcctcccagcgtgctggaattataggcgtgagccaccgcgcctggccaggttttaagagttttatatgtaatctggttactagttcttcggcagatatgtggtttacaaayagattttcctagcctatcatttgccttttcatctttttacagggtcttttgcagtgcaaaagtttttaatttttatgaaatccagtatatcagtttttccttttatggattgtacttttggcattaagtcttagaactcttagtcctaggtcctgaagattttcttccatttttttctaagagttttatggtcctatgttttatatataagtcttcgatctattatgagataatttttgtataagtgtgaaagttaggtcaaggttttattgctttgtttttttgcatacagatgtctaattgcttcagtaccatttgttgaaaagatattcctccttttaattttattttagaagaggtggggtcttgctatgttgtttacgttagtctcaaactcctgatctcaagcagtcctgccttggtcccccagattgctgagattataggcatgaaccaccatgcccggcccctttcttcattaacttaacatcagggagaacgatttctcccgctttattctttttcagaattgtttgaaatgttctacatcctttgcttttccagataagctttagaataagcttgtctttatctacgtgaaacgttcctgagattttgatagctgttgcgttaaacctatagatctattgtctacataaaaccttcctaagattttgatagcaattgcgttaaacaattaactggcatctctacaatgctgagttgctcagttcatgaacatggtaactctccccagtttttaggttgtcttttattttctgggttttgtttttttgagacagagtttgtcacccaggctgaagcgcaatgacgcattctcggctcactgcaacctccgcctcctgggttcaagtgattcccctgctcctgcctcagcctcccgagtagctgggattacaggcacgcgccgccacgcccagctaatttttgtatttttagtagaaacagggtttcaccatgttggccaggctggtctcgaactcctgatctcaggtgatctgcccgcttcagcttcctgaagtgctgggtttacaggcgttgagtcaccatgcctggctttgtctttgattttcatcagcattttcagatttttagcatagcgtttccgtacgttctgttagacttatacctgaatatttcattttctttgtcactattgtaaacgatggcatgtttttcattttggcttccacacagtcatcatctctgagctctttgtgcagcactgtggttggagtagtctgagcttttcatgttcatagcaaaggagagaggagcagtgggagtgtgacacttgagtcacgggcgtgtgaaaatcagatatgcaaacaatgtgggcatgagagcagacagaactggattcagatcccagctctggcactttctagccttgtgttattgggcaggtcatttagtctctctgagcctgtttcctcaaatgtcaaaaaggagaataatactcaggcaatccttttgtaaagctttgagataatatatataaatattgtttgcctaacataggtctcaaaatgtcttagttattatgtctggccacagtggaatcatgtcattcatggttagatccaaagtgagagaggcaagtgtgcctactattatgagcagcaaatgtttcttgaacctctctatggtgctgatttccaaggatgtgaagtcttgacatagctcttgccctcaaggggcttataattctgttgaggaaacctactgtatgaataacaattccaggacaaggtattgcttgttaagttccaaataggtgggcagacagtgtgagtgcatcaaagaaccttctctgggttttgtttgcccttttgtaccctgtccattgaggtggcttctggatgttgttgatgagagaatgtgtggaggtgggagagggtgtgtacagatttaggggaagggtgtcatgtgggaatatgtaattaatttttatactttccccagtaaaccatcgaccctttttatgatgtcatgagggattccttaattttgcagctgcttcctgattacgtcagagaggagcctgtcaccccacagcctggagctgtactcrtacaagaattggaaacaaatgaagtgccgaatatctaatggcttccacagggagcaccagttcagacttcccaggccgcctcttgctaggtcttcctcaagtatttctgaccccctgaagtgtctttgttctggaaagacaggacttggcccagagccaagagggagggagcctggggactccttgacacatacctctctccctccaggtgttttgcagtcctgagtttcttcccccttacttggatcttgtttggtgagttgttactcttcttgagttttcaggatcctctggaacctgccgagaatacacgtgagagtctttgacctgctccagcagtcttcacccctacgtaccccctcaacagcattatctccagcctcttttgatgtttctttctttttttttttkttttgttttgttttcttttcttttggtagagacagggtcttactctgttgctcaggctggtcttgaactactgggctctcaagcagtcctcctgcctcagcatcccaaagtgctgggattacaggcgtaagccaccattcctggcctcttttgattttctttctgcggtaattttcatatctgtgcactgcttttcattccctcttctacctctattataagaagatgttacccttacttggcattataaactttatgagtgctttacatgtaatttcgcttgcttcaaacaagttcatgctctcttagcttcccaactggtctccctcattgttacctttttccagctaccctaattagtcctaaatgctttagctagattaatctttataaaatattcactcattgcttcatccaagaacmttgagtgagtgctccctcactgttgagtcaagttcatgttccctgttctggcattgcaggccctatactttgtggttccaggtagagcacagcacacacmgtacttgcgtgcctcaagtagtacatgtggtcccccctgcatccaccaactccatcattgttcatctcttccagcccaccttagaaatggtctcttctggccgagcatggtggctcatgcctgtaatcccagcactttgggagaccgaggcaggtggatcacttgagtccgagagttcgagaccagcctgaccaacatggtgaaactgtgcgtgcctctaatcccagctacttgggaggctgaggcggaagaatcgcttgaacccaggaggcagaggttgcactgagccacagttgtaccactgcaccactccagtctagacgacagagtgagaatctgtctcaaaaataaaggtctctaccatgaaaccttctctgttacatgctagctgaaatggtttcctctccctctggtgacagaaacatcttacttccatcttccttatgatatgtagtacattgtcttgaattatagttacttgagtaggtatgtattcttcctgtcttccttattagattatcttcttctcccagacaggatcctactttcctttatatcctccacaattgggcactcaagtgttttcggaattaatgggagaagtcattttgttagaagattgggatttcctttgcccccatatttccctactttcagaagagctttagaagaaaatccaaagggaacactgacagcgagggctcctagggaggaaattaccttccaccttcttctgtcttgtcttggtgcattaggccgttcttgcattgctatagacaaatacctaagactgtataatttataaagtaaagaggtttcattgacttacggttctgcaggttgtacaggaagcatttcggcttctagggaggcctaaggaaggctacaatcatggcagaaggcgaaaggggagcaggcactttacatggcgaaagcaggagcaaagagtggggcagtcccacctacttttcaaggaccagatcttgcaagaattcagccactaccacatagacagcacccaagccctgagggatccaccctrccatccagacacctcccaccaggccccatctccagcagtggggattacaattcgacrtgagatttgggtggggacaaatattccaccatgtcacttggctgtatcagtttagggaaatgttatgacttgctttacactcagtcagcctctgttttgccattgtgcatgaataatttgcttgggtgtattagtgcctgattctgctgactcattcgttctgctcctcagggaataaaatgatgaaaagacatctctgcttttgctctgagattttgtttttgtctcgttcctatacagcgactgcttcctctacctcctcttcagctagcagctgccacggggaactctgtggctcaagcagcagcagttgaaagatactctcactgcccacttcctgtagacaaggaggttttggtgggctgcttaggaactgtgccagccttgtgtctgactggtaactgactcatgagaaaagcagccttatgtyggaaagataagggccaacaaattgcctccaggtggtggtagtttggaggtgactgaccattcatttcctttctttgggaggagacagtggggagggaattggtgaataagtggtcttgcctgcgtttttctccagctcttagtgatgcagccaggcagatagttggttctctgggctggaatggctcgtggaccccagtgccctcagaatcccctctgctgctatcagagcatcagacttakgtgtcatccatcctgtgtcttctcttcattactcttcttatgctcttgccaggaaactggctgtgtgcaccaagggaactctgatagttccatcgctgccagatttttctgtgaccaaccaaactccatcccactggtactggtttccttcaaatctctccctgatggcaacactggaattgatcagaagcagtggttctgaaccaccatcccttggctcggcttagagggcccaggcaggtgggcctgcctcccatcccctgctcttccctctccgcccctcctgcctcactcccatttcctgcaggaggatgctttgccatcctggagctgtcaggcacagctttgctttggcagcaccgtcgcacacatactggtgggagaggggacgtgtttatcacttttcctggagattatctgtttaagcacttctctgacagttacaataacaagggcagtgtgttgtgtttcccagcagaaggacacttgctgttgaaagatgtatagcactaattagaaatacataacatccggccacatggcagccttctcccggccgctccatttcctgatttcatgcaactttgacgacagttggtttatgttttccatgaatatattctcagaaaaacgagaaagtctccctgttacataggagcaagaagaatatttctgtccgagccggtatttggccataggaataataggagctgtggtcacctgcccacatgtgggaaggagcagaaccaagttcagacctcaggtgactttcttattaagaaatatttccgtctgacttccttagccaaaacccttacccgaaacccttaagcaagtctctgcttttggaaagaaggggaaaggctgtttcacagtgttaatgagttcctcagctcctgtcatgctcctgctacctgacacaaagccagaggaacccaggcgaataccaaggcaaacaatgccttttcctcccccaccccacatcacttgttggcttggcccagcccaacactagggatatatatgggcattcatcagactagggccagtttcctagatctagccccaaagtgggtggactctgggaatctagatgctgttttcctacccacttgtgtaacggtgaatgctttcagggagtagcgtcttacggtttctagcctgtggaagcctacgtgaggccaagagcagcccatgaagatgctgtgcacttagtgcatgtctcacttgaggcactggatccaagttgccgtggatacttggataaataacaattttctttaccctattgaaaggtcctacggttgcagagaccatgttttatttgtaactgtgtgctccatyatacctagtacagagtctggaacattctacatgctcagtatgtgcttgaggtactactgagccatggagaaggacaggccttccaggaggtgctctaggtaacatggccagtcagaggcctgaccaacactcagacatgctgacccccttgatcgtttgtaaaatctccacctgcttgattacagcagaacagttactgcttaatactccgcatcagatggaccagacacataagcaggcagtgttatttcaagcctttcttcaggagggggttaggggatggggagttgaggtgacataaccgtcaccaaggacagagcagtcatgaagctgccttctagctgctgccctgggaggtggctgagcactttcagatctacaccaaagagactccagctgttgctaccttgcctggtctccagaccttattgcaggagcctttagaaaaggagccaacctggagtccacgaagaccgcagatcccattgttgttaagcagccattctccctctgagccctagcccccaccttgaactctgagagacagtctagcttgtgattgccatttgtcataaatacagaactgggcttggtgaaagaaacctcccctgtcttatccctgtccagggtcatgggagtgtcttagtgtagcctgtgcttcataaaatgccagtctcttggagccaggacacccccctccatcccttctagccttctgagtgcaggtaacttctgcttagttgatgaggaggcactaatgtttactcagagtatcagctaccaggatgtggcctccacttgtcttctcccaactccctcttttctggacttactcccttcttcccggctctgttgctagttagaggcaggatgttgtccgggcgtggcaatggcctggactgagctgggcggtactgacagtgctgctgcctatggggagggtgaaggggagaagttggtaacttttcttgacaacttacatatctccccctttcctgctttccatcctcccctcttcttggctcttgcatgcttgttttctttgtaacagaggtttagggccttaacaggacaggagtgagactggtctattctaatcacatggattgttaccacttccttaactgcctgccacagttgagctggaaagtcagagggtgacatctgggaccagtgggcatctggaaggttggtgggaaagccacaatcaaagaattactaccctggatgctattcgtttgttgggcccttctgagcagcagcctgctccttcttacacccagtactttcagaagtgggttggggctggctttgtgtactccaatcatacttgctcctggggcaaagatggtaaggaatcactgtggttgggtattgtctcctggagtaacaacttcaatggggccccattgacaagactggtgagctgatgagagggctccccttggctactgaggttaaaatacaggcagggacagagatcagacattcagctgattatccttttaacacttggagattctgagagttctcctgtattagagagggaattcacagattagctgctgccagagctagtgagcctggcccctgattctgtctcctgtgggtatgtggtgtctcctcctcggaggctgtgtggtggactgctgccttctgtgtgtcaccagctcctctcgagttcagatgacgtggctttcagggaaggccagtgatgaagagtaggtacaggcaggcttttgggagtatgccacatagctcccaccaaagaataattctgcccaccaaaaagatggctcctttcggtgacctggagccagaaggaagttagttagccaggctgaaaaagtgacgggaagagggtactgggattgggagccaggtttattttttagcgctaggggaaggaatttgtgaaaacaaaagccaacactgattaagtgcttattatgtgccaagcactgttctgcataaaattaactcattccatgaaagtaggttatttgtgtcatgtgtgttttcttaggaggagggacatggaggaagtaaggatgggactaaaggttggtgattcaagaagatcatttttagacgagatcgggcgcgttcagggtggtatggcagtagacagaagatcatttttaaatgtgtatttttccaatcttaaytgatgactgtgctcctgttagttatacactagagagactgagttaattaaatctgagttcttgttacgatggctttacattatcagtaggcagctaaaggcagagaccatgcagctccagctcagactgcccttcytgaggtaaccgttcctgggaaagtgatgtagaattgacagaggtgacccttatcatcwtatcaaacacatatccatatgccagacctcatggtaagtgcttcacatgcattttctacttggccttatgaccactctgagagagggaatatcactagccctagtcttcagtgaggaaaaggaagctcggtaacgtggccagtgatgtgcatcttgtccgcctggggcgctgagagtttcatttgcctgtcygcagactgcttctcggaggagtgccgctctgtgatccaggaacaagccrcagctctgggcttggccatgttttctctactggtcygccgctgcacctgcttacttaaggagtccgccaaaggtaagcaggaggagtccccagcctggtgggctttccagttgcctggccttgtccagacctcacagtgccatgctgttttctcggtgtcttctccctgtagtctccattcttcctcttacctacatgcccctcttccttttgcctgcctaactagtcccatttccttttacagtctgattgcctctaaggccctcttctcctttttgtagaaccctttcctctctcttttctcctttagtagttaggattttcactgtacctatgagctgctgcatgttcctgcatcttcaggaaaccagaaaagttagtttccataatcgacgttgtgttttcccctttatctctttgtttctgtttgtgtggtacctggtgagttctgtaaccrctgtggaccagccatcatgggagactcactggaccagatagagcaggtgctatttttagcccttaggttgagacagtatcccatatcctttaaggctgcccttagaagtctaagccagattgttgtagcagtagaaggtagggctgaaggttacacctttcttttcagctcctagatcaatattagtgacttaatgagaccccactgtcaccccatgccgcaccagctttgtgaatgcctccagcttcggaggctgccttttttttttttagggacagaagggcaactttttattttgaagtaacttcatatttacagaacagtagccagaatagtgcagagaactcttacatacccttcacccggattccccagttaacattttaccatatgggcttacgttcgtctttccatacacacatacttaaggttattatttttcttctgaaccatttgatttttaagttacagagttgcgggccctttacccccaaatacttgactctatattcctaataataaggatattctcttaacaacggttatcaaaatcggaagtcaacattgacaaaatactattattgcattcacagaccttacttagtttgtgccagttgccctaatttctttatagcaaggggaaaaaaaagttgttttctgctctgggatccagtgcaggagcacacgttgcatttagatatcatcgtgtctctttaatgtcctttaatttgggatggtttttctgtctttctttgtcctacatgtccttgtcatttttgaagaatatgaagcatttgcacmgtgtcccacagtttgggtttctctggtgtttccttgtgattaaattcaggtcatgcagttttggcaagaactctggtgccatcttggtactgtgctgaaggaaggctggaagggtgggctagaggccagagtagaggcttcagccaagccacaggtgaagcagaakcagttgtgtccaggggcagacccagtacactggttctctctttgtcctacttttcagaatcctcttaggtgctggcgcttgtcctcgcttctgggcctatctttcctgtggacttggtctccctkccctaagagcttgctgccgtcccagcgccccaggcctcactcgggggctacagcagacataggcccagttctcaccctttgcctctgcagctcagctgtcctctcctgaggaccaggatgaccaagacgacatcaaggtgtcttcctttgtcccggacctgaaggagctgctccccagtgtcaaagtctggtcagattggatgctcggctacccggacacctggaatcctcctcccacatccctggatctgccctcgcagtgagttgacctgcccattgcttcagcaccactggcttgggcctgcccgtgttcctacagctcccctcttcatcctgctctgtttctttctgcccacagcctgcctgcytctctatttcttctttatttgaactttttttgaataccttccctatcctctgatgttttaggttattttttcctgttctccaggcctcttcccyctcctctcacactctctttttcctctcactctccattttgttatttgttcttgctctcgttccctcatcctcactccatattgtgcatactcaccatctctgcagctgcctctggagtctggatttgtgtggatatgtgtgtgtgagactttgtatcttctcttattagtttttctgtgcatcttgcttttttttttttttttgaaacagggtatcactttgtcacccaggctggagtgcagtggcatgatctcagctcacccaggctggagtgcagtgacgcgatctcactgcaacctccacctcccagctcatgtgatcctcctgcctcggcctcctgagtagctgggaccacaggtgcacaccaccacgcctggctcattttttgtatttttcggtagagacagggtttcgccgtgttgcccaggctggtcttaaactcttgagctcaggagatccacctgcctcagcctcccaaagtgctgggatgacaggcatgacccaccatgcccagccttctctgcatctttaaggctctctcactgctgcttgtgctgtcttctgcagtttgtctcctggcatggcagcgtgtggggaggctgaatgcatgcacatctctcttccattcactcatgccctgtcttctcaccacgtccctcccctcgccccctgtcttctcaccacgtccctgccctcgtccccgtcttctcactacacctcgccctcgtttccgtcttctcaccatgcctctgccctcaccctcatcccctgtcttctcaccatgmgcctgccctcgccccctgtctctgtgtgtcagtctggcatctctcagagcatttgtgtatagcagagagcatttgtgtattgggggcgggggcaggtgttggagtctgtgtgtctgtctgggtgtatttacgtagatcagtttatgtgtttgtatacctttttctttttcttttttttaattgtggagatagatgtaacatttgccatcttaactatttctaagttcggtgacataaattacatttacagagtgttgtggaaccccatatggttacttcttttatctttgtctatatctgtgtctgggttgtgtccgactctgtgcttgtctaggtccatttgtctgtgtgtctgtaagtctgtgtgtgtcttagtgtctgtatctgagcgcaaagttctgtgtgtctgcctctgggcgcttgtctaggggtctttccgtgtgcctggtccatgtctgtctgtgtttacttgtccatgtgcatccatccaactgtggccacgtgtgttgttatctgtatgtgttcatgtgggatgtccgtatctatgtctgtatttgtgtctatacctgtttgtgtctgtatatccttgagtatatrtatctctgtatgggattcatgtgtccccaagtaggtttctttcagtgtatgtctgtgttttcatgtctctgtgtccacatctatagctgtcttttttttttttttttttttttttttgagatggagtcccgctctgtctcccaggctggagtgcagtggcataatcttggctgcaacctctgtctcctgagttcaagctattctcctacctcagcctcccgagtagctgggattacaggcacctgccaccacacccggctaatttttgtatttttaatagagacggggttttaccacgtgggccaggctggtctcaaactcctgacctcaggcaatccacccgcctcagcctcccaaagtgctgggattacaggcgcatgaaccaccgtacccagcctttttttttttttttttttttttgagacggagttttgctcttgttgcctgggctggagtataatggcgcgacctcagctcactgcatcctcagcctcccatgttcaagcagttctcctgcctcagcctcccaagtagctgggactacaggcatgtgctaccacacccagctaattttttatttttagtagagatgaggtttcactatgttggccaggctggtctcaaactcctgacctcaggtgatctacccacctcagcctcccaaagtgctgggattacaggtgtgagccaccccatctggccctttttttttttccccccagagtcttgctctgttgcccaggttcaagtgcagtggcatgatctcagttcactgtagcctctgcctcctgggttcaagtgattctcccacctcagcctcccaagtggctgggattacaggtatgagccaccaggcctggctaatttttttatgtttagtagagatggggtttcaccatgctggtcaggctggtctcaaaactcctgccctccagtggtccacccgcctcagcctccagaagtgcagggattacaggcgtgagccaccacatcagaccagtgtatctgtctgtgtctgtgctgattctgggtccatgtcagtctgtgtctgtgtctgggtctgtgagtatgtgttcctgaatgtctgtgttgtgtccatgtttgtgtgtaactatgtctctgtatgccagtctggatctctctgttagagggggtttctgtgtatgtgggtcttcctgtatctgcctgccttgccttttacctacctgtctgtctgtctgtcctggcctgtctctgcctgcctgcctctgtctttctctttgcctctgctttcgtctgcctctgctgtgtgtgtgtgtgtgtgtgtgtgtgtgtgtgtgtgtgtgtgtgtcgcacgcacctgtatcagggatcagcataccatggcccacaagctaataatggtttacatttttaaatggttaaacaaaaaatcaaacgagtactatttcatgactcatgaaaattgtataaaagtcagattttagtgtccataaagttgattggaatataaccatgcttacttgtttacactgtgtctatggctgatttcacattacagagcagagttgagtagttgccacaggctgtatggttcacacggcctggaatatttgcagtttagctcattacagaaaaagcttgctgacttcaatctctgtccatgttccatgtgtcacattcttctttgtgttagtgtcactgtgtgtgttcatgtttgtacaactgtgcgtgtaggctccatctctgttcagccctgttcactattcatctctccctcctgctcactttaatttttccctccctccctcccttctttcttttttctttctttttccttcttccctcccttcctgccttcctaccttcctttcccagggtctcgctctgttacccagggtggacggcagtggcacgatcacagctcgctgcagcctcgacctcctgggctcaggtgattctcccacctcagtctcccaagtagctgggactacaggcatgcaccaccaacccggctaactttttgtattttttacatagagatggggcattgtcatgttgcccaagttggccttgatctcctgggctaaagcggtctgcctgcctcggcctcccacagtgctgggcctctctttcttatctctactcttccttagtgtctctgtctttctctgtttcacccctgcccacyccacccccctggccatttctcgtttccctcttccttttcttcccctaccccacattctctcagtgtggtcttcggctggtgctgtgtacccaaagctccttcatgctctgtgttatgcatttatgtgtgtttcagaacaagcatctccagtgttcttctctggagagaagtaatgctgggggatagattatggagaccctggctactttggagggcacttttggggagtagggaggggagcttgtttgacttggggaccagccatgtgagtctcctagactcatgggtaacctccagagggaaggctaaagcagagatttctgggcagcagtttatgtgtggactgtgtagtctgattcttccccttttctttctaaattttttccctgtacttgcctcaagatgtaccccctggactgttattaatctcagtctccccatgccctccccacctctagctctgtaacggtgtgggcggcactcacagcatcggacagttctctgcatcctatctgtgggccctcctaggtttccaaaatgcactccaggctgaagccttggagctccaagctgtgcagctggggccacacaaaggaactgacggatctgctggccaggggacagctgtttctcagcagtgatccccaaagagttaacatctacagcctcaaacttttcaggctattaatctgtaatgaggactaggcagtttgcagttttggaamgaaaatgccaagaaaggactcagttctccaagtatctaagccactgcttctgagcatgcacaagggtcactgagtgtcccttccttactctcagggtggggaggcagaccatctgtccttggagcctgggccttccccgggtcacctcacctcacaaccacaggtctcttagataggattcacacagcccctgtttacccatatcccgggccacaggtctgttagctctctcacgcagcatgtctcccttcatccctcctccctctctcactcccttttggcttttgttyggctgaggaaatggaaagctcacacaggaagtgctgggtctcatttgcttgagatgctgagtctgttttctctttggatgctgcagcaaatggcccgttgccggctctgagctgctgcccatctttgggcaagggctcaatctacaggcaggcacgtggtccaagctacagccatccccggctgggcttcacattctgggctacagagaggcagagggggttgggacatttgagtcatatttgcttagtcttctcagacttcttcacgaggagagcaaatctgaccaaatagtatattgaatttaattacccagcaaatacgttaccgtagctgtggataccacttactctctcgtgaagccagtccgggctagagagataaaacagtgtaatagagaaaaacatctccttctgtgctctctttctttctctctctgcagttaggatcagcagctggttatctctggaatgcragtttaagcatgaaagagaggctttgctatcctggggcctgaccccaaggcatggctatttaaggactggtgcccgcgttcaacagagcaaacctggcctgactaccactgagggtagtcccacctcagagtcttcagatcagaggmctggaaaagtggaatcagaattgcaccttccttcttttgtttcccatattctcatgtagcttcctaatactcactgagtaaatactctggttgagagattggcaaaggtatggtgcttttgtgggtttcaaacttaatctcatgcccactgaccttacagattgaagaggcttttcttttaaggtcatagagaataacacaccccaatggttctgtagatgccaaaactgtaacccccctgacgcttgtaaagtccttgttgctgctcatcgttttgaagggtttgsaaatgctcccaagggagcaggaatgaaatggctgctgtttagtgccccttcttggcatgctttcattggtctttgcctgagtttcttctttgcaaagatacatttctctgatcctaagataaggtgaccagagagcctgtttttcctacaaagaggaagtctcctttgcttttcctccagaaaccccacttccaaatggtccctctgacatgtgggacccttctttcatctctcttccttcattccctccctgtctttaatttgttaccytctttccttatgcagttagagaatcattgcacagcatcttcccctctctgaggggaattccagggttcatcttgagtttccttggttctctcctctttgcccatgctcctcttccttccagtcaaawccacaacagcaggcacatgtggaacacctaggatgatgatgagagtatcgttggcactgcagagtgatgagggcaggattgctgggcatgtgggcatgtgtgccttccctcgctgtggcacttattagatctgtgtgttagagccagcatggatggaagcaagttgactccccagttgtacccgttagggattgtaacagaatggcttcataatcccaggagattattggtatagaggattatagcaggatgtggaaagtggcctggggccactgtgaaagtcaatgtagagtgctgggtgtgtttaggacagactgcttggtttggagggcccacctacttgccccatctgctagcatagtttgtgttcccatccacaccaagcctctggtgagaagggagaggcagctgcacccctacttcggcaagtgagcacaaggaaagtcgtgctggagaggagtagagcgacaggcttcatggacctgagcatagtgaccccttgcatcccaggacctttggcaaggctagggcagtgggacagcctacctcatttcagtctctgctgaggccaaatcttcacttatcctgatttctagttctcagtaagtgaaagagtcaggggactttgagaacatccaaacctagcccagctgtggcagttggtttattgctttcagctggtacttgaacccaggtcctggtcttggaggctttcccaggtttaatccccagagctttctctgcagctgtatgacactgcgctgaccccgaatgaggataggaaaatagaaccagtgccaagccagagtctctttttcatttggagtctggctgtctgcccatgaccagggttacataatgggaaacatagctggggctctggagagcccgcgtttcaccaggctgcccagaccttcgcattctgatgctatatatcttcctaattgtagctcggatgcatttatcacactgttggattggagtactgtttaaaaaaaaaaaaactctagaaattcttgtacttgctgcttttccatggatcgtcttccatagtctacagagcacactggagaagggtcgtagggagccctctgaggtcttgtcacatagggagaaagagggatacgtagggcgtatgcagtaagctgacttccttagggagcttccatgtgttgactctgtagatgagatagaaattctcaagttaaaaaacaactagttcactcaccttcatagggcagctctgaaataagaactaatcccaaggctaatcggcaccccttcaaggacacttaatatgccttcccaaaagggcattttaggaggtcactgagtaatagtccatcagcacttccctgaaggaagtggtggtggctgtgggaagcccctttgctaccctggctccccacccagtctccctggctccgggttggggcgttagcactgcagcctggcaccagggggttcctcttcctccaagtgctgagtgtggggcacacgtgatctctcccacggcaggagcccctgtcccctccccacgcctcccgtaggactccttgtgagaggaaggggtgttggcctaaggctccagtctgaccccagcagggtacagcagctgaccccagggagagtactttccagctctgagctgaggttatttgggtccagtgtgtgctaagctaagaagacgtgttggagtggttacagctaaaagtttggagaggcaggaaccgtgagaatccgcaccagggaggccgccgagggctccactcatgccgtggagatgtcaggatcccctaggggctgctctttcccaaacatacagtgctgatgggtttagcacaccatagtgatatgacagaggctatacatatgagggtggctttggagaactgaaatcaaataaggcgccgaccccgaacatattgggggcagtggatggttgaggtgctctgatacttgagaaatcctggaacgaggttactgtgacctattgctggccatagggttccagctgccctgcttagaacatggagaggtttatattcttgcagtagggcaggatgactaagcttcagaatttgatttgcccttttgggcaaaattgatttagggtgagtactctcccaaagtcccaagtcgacttgttggtataaatgagaaagatagaagggattaccttcatctaagtctggtctctttaggggtcacccagcaaacatctcttattcttagaggatggtgtcttgctgctcatatcttaactcctggaatggtggcctttgatacctttgtctcttctttgtatcatgtggcatctggatgacacattgttgctagaaatctccaggagccgcatagaattctccccatctccagcccagcccagggcctcttgagctacctagcactgaggtaccagaatcaaatccttcgcccaatgcaaacagagttggcatgacatcttggctttccaagaggcatgctaagccatttcaagcccgggtattattcttttaactctgccacacttattggattcaagtccatttctgctattagctgctgaattcctgcagttttctccagtggagtgagaagctctccagggcaacagtggtcttatgttagcctctgacccctgcgtggacagttgtaggctaggatataatggcccacagggaaaccgtttgaaaaggcagatattgcatgtcttaggcgtggttctcttgttacagccatttgtctttgtgtctgtaccacatgggtgtcctctttttcagcttctttgtgcctagcttctgtgccatcttggctgtatttccagatctcctcactccaggaaccagaagacccaacttgtttcccatctgtactgcttctctgatcttccatagctctgaaacacaatgcacggcttcttctcactcaactctttccgggtttgttctgcagctgtggagtttgaatgttagtgtttaaacaagctggtattacacaggaaatggccacctccacaggccccagcaggcttgtaacatggggtcattgtacttgatgttaatcaccagtcagcttgttcccccagtaaaatatgaaggagtgtgtgagtgcctcatcctccttagacttgccaggaagatggactgagtcttggtcaggcgttggtgctccactcttttcagactctctcctcctctcagtcctgccccagtggagctttcagaaaaagtcctgcctgactccttccctatgaagctggcagactgcctttctgagttctgggcaagaaggtagattattgtggtgtgacgtgtctcacctggcataccttaatctgtcagaggatgctgcagttgggtaacctctcctgtgagaaaagcaaaattttaggaacacagaaacccatggcccctctgagagcagggcttctcagttccctggacgtcagctgcctttctacagctatttgcagaactcacctcagcctgaagggttaatctgattccggagtcaatatcccccaaacaaccagccaggagtgtgtgttggtttgtttctgtgaaatgtgtttccccagtcacctgggctggcctgggctgcattgtatcggccagcagctgcactgcactcaaactgacagatacattaaaccttggaattctgaggcaataaaaagtaaattaactcttatttttttcctttcctggtggactaagtgaatgcatgtctgtagggaagcaagtgagccttggttctgagtgcatacttgtaactagtcactgctggtttgtcccaaactcggatctggctttccgactccagccagggctctgccgtcstggtgtgtggtgtgttctgtggggttgggccagtgggtcaccttgcaactgctgatccctgctctctaatcacatcacagctgctgagagactccctggccatcattctgggagccataagcaggctcattggacacagttgcgtattctctggctgctttgtgtctgcttggtgaacagtccaccctaactttagcgggatattgtggactctgggaatttccctaaaatatgcattgaaccagaacaaaccagaaggacctgcatgagtccacagcactctagagggtccatttagaatcaaaagttgtttgagattatttgggaaaccttctgggaagttatttcccaagcatttccaaaagattggcagctgtttacagatcctcatcgccacccgaatttgacttttggctccttggccctggccaaccttgaatccatagggcctaagggctgctgtcgggtgaaggctagaaggtgctcctggttgggatgaggaattaaagcaggaaaaagctaagcttttctccttctacagacaggaaatcctatgtgcacccacagaactgacctcccagcccagaggcctgattggggtaagctgaggtgatgttgcccagcttccaggaattacctcatccttttgcaaatatcttaacttttgagttcagacatctcacctggtttttcaaagcacctcttcctttgagtttcctgacactccctcactcctgtagagagtcactgtgtcgcccatgggtctctgggtagttgtgttgtgttcatgtctgtggtgttcgatgaaaggagataactgatgatatgaatgtgaactgagtttgggtgatcccactgaaacaccagaagaaggcagctactcacaatcagagcacaagaccaatttgaattaaccagagcagaagtgacctctcattgaagcattttgtgtatttccttggttctgcacagtctagcttggctcttggaccacttttatttatatttctgagttgggaactctgggcactccctgtgtcttttggcatcagctgctttcttacaaatcaacattgaggtagggattctcgtccaccttatttttgcagtgagtctcaaggttttggtacaaggtgggtggtaatgggcaaaaaggcgtatgtgggcaggggtccctagtggtggccagcagtctctgggaggagtcagttttggtttatctgagccttaggggacaggagagcatggtaatgagaaccacatggtaccacatatttcttcatcttggatccaagatggtaggggtgggaggatgagagagggatgtggggcctcccactgtggcagccgtgggtaattttcggccgcctctctctggctggggatgctgctgcccacaccacccccaacccccaactrtgtcctgcagcagccttgacctgcacgcaccaaccagggcccccaagccaagaattcagctgggagacttttcaccttcttccttctcactgtcgtctttcctgtttattttccaaattgctgctctgcagccgagcagtgcctgttggccaaagctcaccagtgctgtgggatcagactcaggcagcgggctcaagtggccagcagggcactgggggaggaagcggggaactggaagagcctccctgtgcgtctcccatgggcagcactaacctcggaggcggccctgagcagccctatcacatccggtgcttgtctctgcagccgggaccggaggataaactatcagggctgtggggcagtgcatcattcctcttattattttcttctctgcagatggggtcgtggaaagttcagttccttttaaccctcgaagttctgtttattctacagctggtagcctgaatgccgcgtttcccattacatcacaaaggagctcaggcagatctctgcacagaaacgtgttgcaactgtttatttttttccatatttaaacatttctgacagccaaacccggctgagccaaaagatggagctttgtgaatgagtctggttgtcggtgtctgcgctgagagaggctttagaaaactcgtccctccggtgattcttcccaaacatgttctttttcctgggtaaagcctgtgaagcgagttacttctgcagtacacgtgtgttgattatgtgccgttgtgtgattaatggggctgtgttccgtctggttcccaggacactcttgaaaacaagatgtttcatttcattgccttttcctagtgcaatgattacagtaaataaaccattgcagcctccttccacctggagccagtcagggagttcccatacctctgctccactttctcccccactgtcaccttcggtggcatgtcccttgaatgctttcttttctgccatctcccaaagattcttggtctccaggagaaacaaattgcttagatctgaggcccctccctagtaggactcataggcagtaactccactggggagattccaggatgattcttctttgttgtttttagcaagagggtctcactgtgttgcccaggctggtsttgaactcctggcctcaagtgatcctcccttctcatgttcccaaagtactgggattacaggcgtgagccaccacaccccgcccaggatgattcttacagctctctttacatattgcctcttgccactctagctcatgaatctaattgtgaagcttttctttgtaattctcctatgcatctctcttcttttagagtaaaacttagcatccataggatattatctgttccagactcctggttaggtgctttcctggagaagaaagccaagtctgtagccttggcaggccctatatgcttaccacaatttgtagtatccctgggcaggccaaaaaaaaaaaaaaaaaaaaaaaaaagctttatggatcctcagcacccaccaaagcaggaatctgacccacagtcgatttttgacaagtgatggtgacagagaaatgaacctctttttttataattctatgctgaaatttcaattaaggagagccagactttgcagtttcaaggtttcttctcaggttcagccaggacctggtgatacgcaattaggacagccagccatcccagtttgcccaggactggggggtttctggggacgtgggactttcagtgctaaaactgggacagtcccacacaaaccggaatagttgatcaccctgtatctcaccttccacaaatgagagaaaggagaggtgtggaatggctgagacagcgctgatgaattgtgtaagaggctttaccttcctgtgaggatcttgatgggccaggaatgaggtttttgtttgtttgtgtgattggttgattgattgattgattgcctgcctatatatagggaagagatttctaaagcattgtaggaggaaaacatgcatgactcttgctgtattgtgactagaccctccatggctgtggctggaggaggagaggctggtgctcagttgctgtctgtgtggcatgtacttggctggacagcagtggggaattctgggagcagccacaagcactgggtgtctagagtgtttgagtaagcgtctcaggcacactgtctggaaagatgacaggaccctgcattaggcaactgagtctccaaattctttttcctctctggtgaggattaaaaactccccctaatcaatttcaactttgcataaatccacatacacatacctcagattgctgccttgggcacagttttgtttcctagcatttttggggtatgatttcctggcagatgccagcctagacaacatttgctgcaagtacttccctgctcacaaatactgagaatacttttttttactggtccctctttagagctgctcttttcttaccttatttctcacagtgttgctgtggatgtatggtcgacgctggctgatttctgtaacatactgactgcagtgaatcagtctgaggtgccactgtacaaggacccggatgatgacctcacccttcttatcctggaagaggatcggcttctctcgggctttgtccccttgctggctgcccctcaggacccctgctacgtggagaaaacctcggataaggtcagccccaggccaaacatcccyccccattcgcccctcctcttaattctccagacttttttattcttgggaagttttctgtgcaaatggaacatgattaagtcattgagaagggtgttaagggaaaatatcgaccttttagccgctgacatccagctctgtgtcctgaaaaaaaaaagccctctcgacttcctttggtgtgtgtgtgtgcttgctggcatgttgtatatacgatcatttcctcacttgtttaaatagtgcagcttgtgttggcagtgctctcactcagctccaaatggtttgcatcatgcttaaagcaccctcctttctcccccttcctccccgcccccctccgccacaaagctctgcactaggaaaacagccagggctttttcccttctctgaggaggagagtgataaataggtgactagagagaagcagacaccatgtgttaacttagaaaaaaaaacttgtaggaatatgaagcattccccactgcctggtttctattttccttcctctgaggactgcgttttaacctgaacgtttttcttgcctgtctgtttatagaaaacaaagccgattccctgttgcgctgttggagactgtggagttcttagtctctgcttatcagttgggttttcagccaggtaaagagtaggggtagtccagtcggcttcacatttcccacgtgtaataacagttactaggctagggaagtagtagccaccgagcttgggagcgaagtgctgtgtggaggcaggaataccctgtgactgacttctctgcagagtagtgaggatcacatcccctggggacaggcctttggggaggctccacaaatgtcttctcaggaggaagtcttttgacctacatgaagtatatactagggacatagggagatgttaaaaaaaaaaaaaaaaagtaaaaattccaaacatgagccacaaatatgagagactttatgtagaatataaagtcttggcccgttgcagtggctcacacctttaatcccagcactttgagaagcggagacgggcggatcgcttgagcccaggagtttgagaccatccctggcaacatgagaaacctgtctctacaagcaaacaagcaaacaaacagtttttagtataaaagagtatttgttcactgtggaaaatctggaaaacacacacaaataaaaagaggaaaaattatccgtaatccttctttctacccagaagtgagagcactgttattttgctgatcatatataatcgtatttaatttatagtmcacacacacacacacacacacacactctttcattttcaataaaactggaggttatattaatatttatatatactatttgtttttattttattttattattattatttttagatagagtctcactctgttgcccaggctggagtatggtggcacaatctcagctcactgcaacctctgcctcccaggctcaagtgatcctcctacctcaccctcccacatagctaggactacaggcacccaccttcatacctagctaatttttgtattttttatagagatggggtttcaccatgttgccaggctggtctcaaactactgaactcaagtgatttacctgcctcagtctcccaaagtgctgggattataggtctgygctaacatgcccagctgtatatactgtttgtaatctgcttttttcctaacatttttaatatattcttatatggaatcatttttatagttacccagaattcttttatattccaagatttctttaaccaatctttgctttattgaaccaagagaatgttcccaatttttttacagttatgaatagtgtatcaatttcttgtagcagaatttgagcatatattccctttggttaaattgctgtaagtagattaaggttctagacattgatatatcaaaaactcatactctttggatgcacttaatggctactacatcttgggaatcagagaacccttctttcccaagaggaatacttactttttgcctttccaacaaaaacgtagagtgaaattctgctcttctagtctcagaatgggaaaataatggggatttgtagtatgtgaggctgaggacagctaacaagttgttttatacatgtggaagatgttgagttagaagagagactggatgacatggcttgggccagaggatccccatacttttctttggtgatcacaaggtggtcttgattccagaggatgctttggggagttcgctattgaagctgtcttttagtgtgggacaggtgctgagtagaagagtcctaacgagcttcagactcttcctacgccccatcttcatcagctctctcagctctagtgtcagataccacgtatgtgttttggctcgaggagaacacagagccagcagaccagccctcagcctatgtagtgatccacaggctacctagggggcagtggcggctcagtgagactaaggtaggtctccacttcaacgactgtgaaataggtatgtcaaacctaacatgtccaaatccaaactcctgaatcctgccccacccgctgcccgccaacctggtcttcctttacccttccccatcttggtaaatggcagccttgatttttgggctgcttgtgtcaaaatgcttggggttattcttggcacttctttgtcacacttccatatctaatccatcagcaggtaatgtcttctttaccttcaaaacacacacagatacaattctgtcttcccactgcaccctggttcagttctctgaaatgccttctgactggttgctctggttccttcccccttctactcttcagtctatttttaaaatatcagtgagatcatgtcatttcttagttcaaaaccttctgatggttgctcctctcacttagaggccaaagttttcacagtggcctacgatgccctccattatgtgaccccaccttcatcccactcccaagctctctgacctcaggtcctcctactgtccttcaacccagtgtgcyctagtcacattgacatccttgctgttcctcaaacaaaccaagcgctcatgcctcagggtctttgcagttgctcttttcttaaccggaaacactctgtactcggctgtgtgcctctcgcactcccttctatcaccttggtaaagagagcttccctggccacatcatataatcatataaagtggtactctgctttattattctccatccacggcaggggaaaataacatctcctgagtatctatcatgtatcagtccctgagctaggtacttctgtacagtatttcgttaagttctctaaataagcctgccatgtaagtattattacctccttttttttttttttaagagatgagtctcactttgtcacccaggctggagtaagtggcactatcataactcactgccacctcaaattcctgcgcacaagcaatcctcccgcctctgcgggacctctttctcccgggttcaagcgattctgttgcctcagcctcccgagtagctgggattacaggcacgccaccatgaccagctaaattttttgtattttgagtagctgggactataggcatgtgccaccatgcctggctgattaaaaaaaaaaaaagttttggctgggcatggtggctcatgcctgtaatcccagcactttgggaggccgaggcaggcggatcacgaggtcaggagtctgagaccagcctggccaacattgtgaaaccccgtctctactaaaaatagaaaaagtagccaggtgtggtggcgggccgtgtaatcccagctactcgggaggctgagacaggagaattgcttgaacccagaaggtagaggttgcagtgagccaagatcgtgccactgcactctagcctgggtgacagagcaagactccgtctcaaaaacaaaacaaaacaacacaaaacaaaaaaaactttttttgttgttttttaatagagacggggtctcaccatcttgcccaggctaggctcaagtgatcctcctgcctcggcctcctaaagtgctgggattataggtgtgagccacacccttcaaattttgtaaaagaggatactgaggctcaagagaaaagaatgatgataagctcacatgggtcatttccatggccaacctaggagttgaatctttaggaactcttgaccttttagaaatctgcaaaagcagacctagcgtgatggctcacgcctgtaatcccaacactctgggaggctgaggcgggtggatcacttgaggctaggagttcgagaccagcttggccaacatagtgaaatcccgtctctactaaattagccaggcatggtggtaggcacctgtaatcccagctactcgggaggctgaggcatgagaattgcttgagcctgggaggtggagttgcagtgagctgaaattgtgccactgtactccagcctgggtgacagagtgagactctgtctcaaaaaataaataaataaaatttttttaaaaaaaacctgcaaaagggccaggcatggtggctcacaccagtaatcccaatattctggaaggccaaagtgggaggagcacttgagaccaggatctctaaaccagcctgggtgacatagtgaggccttgtccctacaaacaagtttaaaaacagccaggtgtggtggcaagcgcctgtagtcccagctactcaggagcctgaggcaggagaactttttaagtgcaggggtttggtgctcattatgattgcgccactgcactgcagcctgggtctcagagcaagaccccgtctgaaaaaaaagaaagaaaaaggaaatttgaaaaatataaacatttcctccagcttctagtgttcattactaggaaatgtaaaacatatctccagtgctcatcagtggcagcaacgtgagcagctttattrctggtcgagattagtctcatgtttggtcctgccttgatgcttattctgcagatacttacgaaacacgtattgccaacacagcctgggagatccagacacataaggcaggtatcttcctagttcgagagacagtttgtgccatatataaagatgtgagtggcaccataagtgaatttgaagagttcttgagttttgttgagctggtaataccccggtgaaggcgtgcttcaagagcactgatttggcattaacgtaatcattgtatctttgaagcagaaaagttttcaccttatatgcctttgagtgcaaatactctctttgttctattcttttcttcagtaatttctgctgtcctgatacattagatctccattctttgtcctatatgtcactttttctgtcatcactttaatctgtttttgcttttcttctgcattctaggaaggtttctcaagtttgtcatcttgatatatttttatagcattgattctactctttactacttctagttcaggttttaagtcttctattgcattatttgttctcttacattatatcttataacctttattttttttgcctgccttttagtcagtccctttatatctttttttttttttttttttttttttgagatggagtcctactctgtcgcccaggctggagtgcagtggtgtgatctcggctcactgcaccccctctgcctcccaagttcaaacgattctcttgcctcagccccccgcgtagctgggattacaggggcacgcgctgccacaagtagctaatttttttgtatttttagtagagacggggttttgccatattggccaggctggtctcgaactcctgacctcaaggtgatctgcccgcctcagcctcccagagtgctaggattacaggcatgagccactgtgcctggcctcagtccccttatatctgtctttgctttttcatttttcatttagcatacttcacagagtctataatttgaagaattcagttgaaggtcaggagcagtggcccatgcctgtcatcccagcactttaggaagtcaaggcagacagatcacttgagcccaggggtttgagaccagcttgggcaacatggcaaaaacctgtccctacaaaaaacataaaaattagccagggttgatggtattacacctgtagttccagctaatcaggtggctgaggtggaagaattacttcagccctggccgtctaggctgcagtgagctgtgattgtgccaccatactccagcccgagggacagagcaagaccttgtctttaaaaataaattcaattgaaagaatatagcagatagtaccttctttttcatttggcattttttcccccaaaatataatttgtttctctatttgcgtgctacattctcctttttattaatatattgcagattattttcttagacctcagctctagtttctacgatttgatgctggtcacttacatttctttgaacagattaggtagattctcactggataccttctttgtctacagtagttttttgttgttgttgttgttttggagatggagtctggctctgtctcccaagctggagtgcagtggcgtgaccccccggctcactgcatcctccacctatcaagttcaagtgattctcctgcctcagcctcccgagtagctgtgatttcaggcacctgccaccacgcccagttaatttttgtatttttagtagagacggggttttgctatgtcggccaggctggtctcagactcctgacatcaagtgatccgcccacctcggcctccctaagtgctgggattgcaggcctgagtcaccgcgcccgtccattttgtttgtttctttgtgtttttgagacagtgtctcactctgtcacccagaatggaatgcagtggtgtgatcatagctcactgcagtctcgacctcctgggttaaagcgatcctcccccctcagcctcctgagtagctgggactacaggcaagcgtcacctcacctggctaattatttttacttttttattagaggcaaggcctccctgtgttgcccargatggtctcaaactcctgagctcaagtgatcctcccgccttggcctcccagagtgacccacagataatagktgaaatcccttgctcaagtatagagtttgtacacattgaatatccctagtccaaaaatctgaaatacaaaagactctaaaatccaaagcttgatttcagattttccaattagggatgctcaaccagtaaggataaagtgcaaatattccaaaatctgaaacacttctggtcccaggcattttggataaagaataagctatattagcaagtcattaacctcaagggagtgggaaggggaccaagtggtgtgcaatgtcaataaatgaatttattttctacattttctgttctgtatacagtggagctgctgtatcagagctatcgctcatgtctagttttcagttttttttttttcagtctctttcatataaatgatactgcagtgtcctgtcaccttcttggagctaccatgtgaagaagaaattctgtcattgggccactttccatttagtatgggaatttgccttagacctctctgaactgctgaagcattgcgaatggtactgattcgtagcagtgagaaagcttccaagtggtggtctgtgtctacctcatgagctgtcgtaaccctttgtggtaggcaaagtaacacccccaccccaaagaggtttatgtcttcaatctctaaaacctgttacatgttaccttacgtgacaaaaagacctttgcagatgtcatcaaggatttttttttttttccttgagatggagtctcgctctgtcgcccacgctggagtacagtggtttagtcttggctcactgtaacctctgcctcccaggttcaagtaattctcctgcctcagcctccggagtagctgggactacaggcacgygtcaccacgcctggctaatttttgtgtttttagtagagatggggttttgccatgttagccaggctggtctcaaacgcctgacctcaggtgatccacctgcctcagcctcccaaagtgctgggattacaggcatgagccaccgttcccggctggttgtttttttatttgtttgtttttgttttttctttgagacggggagtctcactctcttactctgtcactcaggctggagtgcagtggcgcgatctcggcacgctgcaacctccacctcctgggttcaagtgatgatcctgcctcagtctccctagtagctgggattacaagtgcatgccaccacgcccggctaagttttgttgttgtttkcattgtcattgttgttttctgagacagcgttttgctctattgcccaggctggagtgcagtagcatgatcttggctcactgcaacctctgtctcccgggtttaagcgattctcctgcctcagcctcttgagtagctgggactacaagcacctgccaccatgcccggctaatttttgtatttttagtagagatggggtttcaccatgttggccaagctggtctcaaactcctgacctcaagtgatttgcccgcctccacctcagcctcccaaagtgctgggattacaggtgtgagccactgtgcccctctctggctaagtttttatatttttgtacttttagtacaatagggtttcaccctgtcattgtcgtccttgttttctgagacagagtttttctctgtcgcccaggctggagtgcagtaacgtgatctagacccactgcaacctccgtcttcttggttcaagcgattctcctgcctcagcctcttgagtagctgggactacaagcacctgccaccacaccggctaatttttgtatttttagtggagatgaggtttcaccctgttgcccaggctggtcgcgaactcctgacctcaagtgatctgctgccctcagccttagagaataaacaactacataaccaccaagcaagcagctcaagaaacagaataagataagggcggtgagttaccagttccattcagtctgtgttggtcctagtcagtacagtaagacgtgaaaaaaaaaaaaatgaagtattaataagactgttggaagggaaaaaataaagctgtttttatttgtagataataacatgatacatttagaaaatccccaaaaagcataaattattagaattattctcataataagtaaatgtagcaaagttgctggatatgaagccattgtacaaaaatcaatcccatatctacatattagaatcaaacaaaatgaagatttggtgcctggcacagtggctcgcacctctaatcacagcactttgggaggccaaggtgggaggatcacctgagcccaggagttcgagaccagcctgggaaacacagcatctctactaaaaatttaaaaaatcagctgggcttggtggcctccgtctgtggtcctagctacttgagaggttgaggtgggtgaatcacttgagcccaggaggtcgaggctgtagtgagctgtgatcataccactgcattccagcctgagtgacagagcaagaccctgtctaaaaaataaataaaataatctttgtattacaaaataaatgttcatttagaaatactttacaaattaagattagcagccaggcatgttggctcacacctgtaacgccagtacttcaggaggctgaggcaggaggatcgcttgagcccaggagttcaagaccagcctgggcaatataatgagaccttgtctctataaaaaattaaaaaatcagtcaggtgtggtggtgtgcatctgtagtcccagctacttgagaggctgaggtgggaggatcacttgaaccaaggaggcagaggttgtactcagcctagattgcaccactgcactccagcctgggccacagagggagaccctttctcaaaaaaagagaggaaaatcaagattagcaatacggaaaagaaaagattttcttgatccactacccagagataactactgtttcttgttccatgttgctgcatatgttccaacctagaaggatggctgataggtagatggatgactggatataagtgaagttttttggttatttgtttatttattagagacaggatctcagctgtgttcctcaggctggtcttgaactcctggcttcaagcagtattcccgcctcagcttcctgaatagctgggattgcaggtacaaacccccatgtccagcactgattttttttttttttttttttttttttctgagatggggagtctcactctgtcgcccaggctggagtgcagtggtgcaatctgggcttattgcaagctccacctcctgggttcacaccattctcctgcctcagcctcccgagtagctgggactataggcgcccacccccacgcctgggtaattttttttatatttttagtagagacggggtttcaccatgttagccaggatggtctcgatctcctgacctcgtgatctggccgcctcggcctcccaaagtgctgggattacaggcgtgagccacctcgcctggccaatttttgctttttaacagaaatagaatcaaactttatgttttgttttgtaatgtactttgttcacttagcaataaatatatatttccatgtttacctataacatgaatttaagagctgcacaatattgtatgaatatattataatatttgtttagtcctcaatcattagatgttttataggaagttattgacttttatctgttgtataaacgatgccatctcagggagccttacacataagtcttttgttcttaccctttgagatagtttctccttcttagacctccctctctatcatttcatagatatttaaagggactcagaatagttcccgaggataaacaaagaaggaaaggttcatatgagtggaatagaatgctcagactgaatttatcagcatctttccctctggattgaatgttcttcaaatcttggaatgccctggattcaaaagcacctcaaagtctagaatttgagtctttgaagagagaatttgattttttttttttttagacaaatccttgagacttgagagtgctctgagtggtactaaatgtatgtagtcttatctacatcatttaggaggtgtgttcaagggcaaaaatataagagtagtggcagtgcaatgtctgaggaccagaagatcaggacaatgtcctggactccaaactttggaggcaagattgcttataratgaacagtaattaatgatgatgactggtatatgaaaacctgaagattagtgagccgaggtcgcaccattgcactccagcccgggtgacagtgtgtgagactctgtctcaaaaaaaaaaawaaataaawaaaggccgggattggtggctcatgcctgtaatcctagcactttgagaggccgaggcaggctgatcaacctgaggtcgggagtttgagaacagtctggccaacatgatgaaaccccatctctactaaaagtacaaaattagccaggcttggtgatgcacgcctgtaatcccagctactcgggaggctgaggcagaattgctygaacccaggaggcagaggttgcagtgagccaagatcgcgcccctgcactccagcctgggcaaccagagcaaaactccatctctaaaaaaaaaaaaaaaaaagggtcagttatgtgagcatgcctacctgcctagccttcctacctacctacctacatacatacatacaacctttgtctcaagacttaataaatataaaattaaaattggttaagaggagaatgtatgatagaaaaagaaactttgatttaaacttctgccctggtactttttgtctcaccctttttagttttctttactaatataatatcatatatgtaaaagaatatatatttttacttcataattatatttacttttattttatttatttttttgagacagggtcttgccctgttgtccagggtggagggcagtgatacaatcatggctcactgcagccttgacttcccaggctcaagcaatcctcccacctcagtcccttgagtagctggggactataggcgcacgccatcacacctggctaatttttaaattttttgtggaaacggggtcccactatgttgcctgggctggccttgaactcctaggtttaggtgatcctcctgccttggcatcctaaagtgctggaattacaggcatgagccactgtacccagcccataattttagatattcaaaacaattgaaggccaggcgcggtggctcatgcctgtaatcccagcactttgggaggccgaggcaggcggttcaccagaggtcaggggttcgagactagcctgggcagtatggtgaaaccctgtctctactaaaaatacaaaaattaaccaggtttggttgtgcaccctgtaatcccagctacttgggaggctgaggcacaagaatcacttgaacccaggaggcggaggctgcagtgagctgagattgcaccactgcactccagcctgggcaatagagtgagatctgtctcaaaaaaattaattaaaaataaatttatagttaatacctttacttcattaatcaacttactaatatatatttacatacaatgaaaggtatacatttgaatgtatgggtgtatatatacccgtatcaagatacagaatatttatatattctgcataaggaccacttcaatcaaggtatagaatatttccttctccacaaaatgttcccaagtgcctctatcccccatcctactccctgccccaggcagctactgatctaattattctcactatagattagatttgcctgttataaaatttcatatacatggaatcatatagtatatactcttatgtctttgttttgtcactcagcataacgtctgagattcatccatattgggcattatattttttcagtcgtttattgatgagtagtattccattgtatggatatatcacagtttatccattcacttgttgatagatattttggctgtttttattttggaggggttatgaaaaagatactgtgaacattaatgtacaggtttttttgtggtcatatattttcatttctcttggataaatatccaggagtagaattgcttagtcatttaagtatatatctaactttaaaagaagcttccaaacttttttgaagtgattacacccttttatactcccactagcaatatgtgagcgttctagttgctcatattcttgccaacacttggtatttctgatctttatagttttagacatgctagtaagtgtgaagtagtatctcattttggttttatgtttttggagggtttttttgtttgtttgtttgagacagagtctcgctgtcacccacactggagtgtagtggcgtgatctcagctcactgcagcctccgtctcctgggttaaagcaattctcctacctcagcctctcaagtagctgggattacagctgtagcatgccaccacacacccacctaatttttttacatatttttagcagagacagggtttcaccatgttggccagactggtctcgaacttctgacctcaaatgatccacccgcctcggcctcccaaagtgctgagattacaggcgtgagccactgtgcctggccatagttttaatagtcattttcctgaataatgatgagcatctttttatgagtttactgacaattattatatcctcatttgggaaatgttctaatctgttggccatttttaaacattggggtgttttcttattgagttataagagttcttcaaatattcttgacacaaatacttgtcagatatacatcctgtgaatatttctcgtggtctgtgactggtttgcctttttttttttttttwaaacatagtcttgaacagcaaactttttttttttttttttgagacagggtcttgctctgtttcccaagggatcctcccaccttagcctccccagtagctgggactatgggtgcacgccaccacacctgtctaatttttgtaattttcgtagagccatggtttcgccatgttgcccaggctggtctcaactcctgatctccagcgatctacctgccttagcctcccaaagtgctgggattataggcatgagccacggcgcttagccttccggtggaattttgactacacagtagggacttccacttttaactgtttcaaatactctagaattgccatcatttaggacaaaggcttttgaaggtttgatgttttcgtgggctattttttgtgatatcattattgtcagtgacaggaaaaatgaatctttagctgcctaagagtgaattcaagtgtttcttaactaccagtaaactcagaaataaccagatgaaataatataaaacctcatttgtagtgaatgcttatctagcaatacttttttttttcttttttggctcatgcatacacccctctctaaagtgaagagaatartgataaactgttcttaattctagaatgcagaggaaaacgtggtttgcatatgtgcagcaaaaaactttggaagattgaaattgcacaatgagtgtaggttgagcaatggcttcagaaggcatacatgttccgtgggggtgtcctttgctcttgtgcaattagggaactccagagctgcctgaacaggggatttcctttttatttctcacatgccatttaaaaaattaacttcttcccttcttttcaatgttcacccctttttattactcccttaaattcttacttgtggtttcttttcttttaaggaattactcaaacatttatgtgtcccactcctgtgactttggttagaaatgcacctgggccaggttctactggtggtgggaggagagcttgctgatggtttagggatttctaattcagcttcttgtcgccattgcaatacccagctggttctaagcatttgaaatacaggttacaaatcagccagcattccctgattgcttagtactagaattttgcagactttgtaatgagtgttctgaggtttttgcctgttttggttttattggtgaccaacacctcctgatgaagatcatttgcagactttactacaaagttaagcctaactttaagctgaaagcatgagagccaaacagtaagatccaaagctagacaggattggttttggcaaaaggaaagtccatgctttctgccttcttccctttggcctgctcagtcatactcatgttgggtggtacttagtaagcatgcttctaattgtggttcccttccacttacctttgtgataggggtaccaaaatctgtttaccctcatctttgctctcttccagaggaacaggagaggtagttgggtcagtgtgccagaaaagcagaagttgagtatgtggagttcatagctgcatgtatgagtgtttgtggggcagggaacttttaatggaaaacatttgtgttgcatcgaaaacagagcgaggcctggttagagtctgtctgctttgtctgtcagtctgttccctaccagcactagtcactgttctcctgggagtctcaggcatattgtggtttcttctgctcttgctagcccctaatcttgccagagtttttgtgtcatgggtggccccgtgtgcagtctggagtaagactgcaaggttggtgactaatggctttgaagaaggtacttcagcccacatacggactttgggaacctttttaggttaacccttaggaggagggagggtctctagcacaaacagtggaagaaacatgctgagatacatacaaacacttttttaaacccttcccttactgttagcaaagcatgaactagaagaatggagacacacccggtgacaccatgcctgtaatcccagcactttgggaagctaaagcgggaggatcgctcgagcccagaagttcgagaccagtctgggcaacatagtgagaccttgtcaccacaaaaaaataaaaattagccaggcatggcgttgcatgcttgtagtcccagctacttggaggctgaagtgggaggattgcttgagcctggaaggtcgaggctacagtgagcagtgatcgtgccactgcactgtagcctgggttacacagcaagaccctgtctcaaaaaacaaacaagcaaaaaaaaacaaaacagagacaggagggaaaggcttgctgtttgggcttggcatttcatttgtaaatgctcataagggatgcacctgggtgcccagtcttgcatctgacaggctgatgttagtcaagttgtgtgtggctggatctctttgggaaataacagaagaaaagatgctaatttccctgaggatagtgtcactctaagatagaaggacctgtagtttgagcttttaactctttttttttttttttttttttttttttttgagaaggagtgtctctctgttgcccagggtgaagtacagtggtgcaatctcagctcacttcatcctccacctcccgagttcaagcgattctcctgcctcagcctccggagtagctggggttacaggcacccactgaccacgcccggctaattttttttgtatttttagtagagacagagtttcattatgttgcccaggatggtctcgaactcctgacctcaaatgatctgcccacctcagcttcccgaagtgctgggattacaggcgtgaaccacggcacccggcctgagctctatctaatctgagtgcccctgaaattgacatttgttcattattttaaaaaaaaaaaaaaaaaggtaaagaaaacagtaaaagagcagctcagctcagttttctgggtccccaagaaggtaccctaccaatgtggttttcacattttcaggtttttggctggtgaataagattgagcagaaatgcttcttcccctgataacaatacattcaaatgcaggatcaggagcgtgtggattaaaaccagacggtggatgattaatacttttgcttatagaggtagacatggcagcttcctccatttaaatgaaaagaccttttctctgcatttgtatgtgtgcatatgcttacatgcttgtgccctttatgtacaagctgcgtttctgtaccatttccttcctctcttgaagcacccaaaaagtgctagaaggactaagttgtgaagcagaggcgtggagatcagacactatggtaggagtgggatgtgttctcttcttcaggctcactgctttcatagctttctgggtactgctgtaacacacatctttttccatggaacctacttgctccttatggtcatgtaacctcattataagaggcatactttttcatttaatctgctatatctttggaggtggctatcctcatcattttattgttaatgacatgaagagaaactttattttcacatggatactttatgttttttcccttacccactgaaaacatgacagatttcttggttcattcgccgtggctcacgcctataatcccagcactttggaaagctgaggcgggcagatcacctgaggtcaggagcttgagaccagcctgaccaacatggtgaaaccctgtctctactaaaaatacaaaaagtagccgggcatggtggcgcacacctgtaatcccagtaatcccagctgctaggggtgctaaggcaggagaatcacttgaaccagcaaggtggaggttgcagtgagctgagatcccaccactgcactccagcctgggtgatggagtgagactccatctcaaaaaaaaaaaaaaattttttttctcagagtatactttgttttttttgagacaacatcttgttttgttgccagtgstggaatgcagtggctcactgtggcctcaaccttctgagctcaagggatcctcccacctcagcttctgagtagctgggaccayaggtacatgctaccacaccccgctaatttttgtatttttttgtagagatgagatttcaccatgttgcccaggctggtcttgaagtcctgagctcaagcagttcacccaccttggcctcccaaagtgctgtgattacagccaccatgctgtccttatactttttaattagaggttagcaggtgtttattattaacaatagtttcagtattcatttttattaagttctgtgcacattaatcccttccagccagcaggcctctagttagtctaggcctctgatttcagcttgaatatacactttgctcttttggagaaacagagacctctgcctaagtgaaacaggacatgtaaagggaggaggaataccaggctgagatttcatacctttgtaatctctaaagaaggttgtattgtctctacaacaaggaaaaagttgaaggacaaagggcataaaattctttttttccaacataaatctttgtctgttttatagtgttgtctgtaatttcaaggtgaaagtgggccctccctcagccccgtcacactctagatgcatccccagattcccccccgtcaccgtcacactctacatgcatccccaggtttcccagtcaccgtcacactctagatgcatccccaggtttcccagtcaccgtcacactctagatgcatccccaggtttcccagtcaccgtcacactctgcgtgcatccccaggttcccccgtcaccgtcacactctacgtgcatcctcaggtttcccagtcaccgtcacactctacatgcatccccaggttccccagtcaccgtcacactctacatgcatccccaggttcccccagtcaccgtcacactctatatgcatccccaggttccccagtcaccgtcacactctacatgcatccccaggtttccccagtcaccgtcacactctacatgcatccccaggttccccagtcaccgtcacactctacgtgcatccccaggttcccccgtcaccgtcacactctacgtgcctccccaggttcccccgtcaccgcacactctacgtgcatccccaggtttcccagtcaccgtcacactctacatgcatccccaggttcccccagtcaccatcacactctacgtgcatccccaggtttcccagtcaccgtcacactctagatgcatccccaggttcccccgtcaccgtcacactctacatgcatccccaggttccccagtcaccgtcacactctacatgcatccccaggttcccccagtcaccgtcacactctacatgcatccccaggttccccagtcaccgtcacactctacatgcatccccaggttcccccagtcaccgcgtggagtggcgttccaccagtttacccctgtgccatagagactcttagcaaccaagatgggcgggtttgcataagttaaaattcactctgttgtacagttttgagaaacacatactttcatgtaaccatcactacaattaagatatagaccattttcaacacccccaaaaattccctcatgcaaccagctcccttcccaaccccagtccctgacarcttctgatgttttctgtctctgtaacttagctttttccagaatgacgtataaataaaatcatacagtacatagagcaggggtgccaatcttttggcttccctgggccacattggaagaattgtcttgggccacacatagactacactaacactaacgatagctaataagctttaaaaaaaagtctcaaaaaacatctcatagtattttaagaaagtttataaatttgcgttgggctgcgtgggccacgggttggataagcttgatatagagctcttgagtctggcttcttttcgcatagcgtaatacatttgagattcatgcatgctgttgcctatatcaatcatatgttcttttttgttgcagagtagtattccattgtatacatacactatgatttgtttatccattcaccagttgaacatttgggctatttgcagtttttggtggtcatggatagaactgctgtaaacatttgtgcatcagtctttacgtttcttaaatgaacttaggttttcatttctcttggataaatacttaggagtggaacgggtggtttatgtgataagagtatgtttaacttcgctagagaccagcaaactgttttacaaagtggctgcaccgtattgcacgagcagttcctgttctggcatcattatcagcacttgatcctgtcagtttgtttgttttttaataattatactaggtaccttgtgattttaattcgcatttctctaatggctaatgatgttgagcatcttttcatatkttcatttgtcatctgtgtatcttctttggtgaagtgtctattcacatcttttgcctattgttaaatcggattattttcttactgagtcttgagaggtctttatatatttaggatgcaaatcctttgtcaggtacaaatgcattgcagatattttctctcagtctgtggcttgtcttttcactttagagactaagttttgactgattaaatgctgagagctgaagggttcacaggctctcttagtagaggaccataaggaaattgagaccttagtcagcagaaagttgtgaggaccaccccttttgaagctgtttatttaaaatgaaagagggggataaggggtgggccaaactgaattgtccagacagatttctgaagcttttttcagttctttctcctgtccccgcctatgatgtagcttctgggctcttaccttcaactgggttcctcacttcctgccatcactccaaattcatcaaggcctctccggctcaggccgactccaacagaatacccgagaggtcaggccagcttcttgcccgtagtatattccagagtgaagtcgttttttgataagtartcattcccaattctaaagtgatagcctccaaggagtcattgctttgaagaactcctttcatctccagctggactcttttccaaacaaccatcggcagagcctagtcagggttctgacacacagggttctgccatgagaagcaaattggcagcagcagacaggcccccgaggcaatggaattcagttctcaraacatactcaccatgggtctctttcatgttgtgtggaattctttccactgggcagccgcataggtgtagggaaaatgtcctgccccattggataaaagtcaagagaagatactatgtggaatcttgtcactttttaattgctgatccgtgttaagatgtttttcttaagcagcatttgccactgactagacattagtagagtttctttttctttgtgcatgtgacatggatcactaacactgcatgtgatggtcagaggaggcctgccttagtgctggagatctgaccatttctccaggacagtggagcctggtgaaggctctctgacttctgatcccagttggagcaatgtgttcagagaagaatttctgagccttcgtgaatctcagttatttgcatgtctttttgtaagcaaacagcaacttgtaggcaggcttaaaactttctttttctgctcatgaaagtacagattttgctatagacaaatcaattgaatataaaactgtaatgtggaataatatttcaggctttaaaaatggagggatgggttaaaaagttctgcaataaatctgcaaatgtggaatctaagggaaatgatcccatctggaaaaccctgctagtggtgctatggctggtttgtggagcagtgcagactgtggagtgaaaaaagaccctgtagtcttgaaagatgacaagctccttaattgatgtccatttcagctggtgctgtgccagcttatgttggcctcggtccagcgttcctgtaatttgggagccaggtgtgaagcatttttgttccatcttgttccccagcatctacagaagcctcacccatcttacttgaggcggcagcacgccataggaaacagatgtacaggtagaggtggaaggaagtgtcacagctgggttacggattttttttttttttaatccttcacactcaagtgagatctgggtttgagagttgggggaaagggtatttcacagcctcggtgtaagatgtcactgtcaagtatcctaattagaccaatactcatttgtgatttttaaaaacatatcttattaccttagagtcatactttgtataggcagagatcttttgtgatttgcctttgcctgacttctgggaacagcaatataaagtgtaataggaagaacatctcaagatggccatcagagttgaacctgrtcacttccatagcatcgagggccaggagacataaccacctagaggtgagctacccctgatgacatggggcatagctgtgtcctttggggatcacttccatagcatcgagggccaggaagacataaccacctagaggcgagctacccctgatgacatggggcatagctgtgtcctttggggatgttgatgaacacagtagacagtgccaacagcatctgttcaacacattggtattgggcccttgatactctagaccggtggtccccaacctttttggcaccaggaactggttttgtgggagacagtttttccacagacagggttagcagtgggtggtttcaggatgaaactgttccacttgccatcatccagcattagttaggttctcagaaggagcacgcaggctagattccttgcacgtgtggttcacaatagggttcgcgctccactcctgtgagaatctaatgctgctgctgacttgacaggaggcggagctcaggcggtcttgcttgctttgaccgctctcttcctgctgtgcggcccagttcctaacaagccatggactggtaccacggtccacaaccccgggggctgggacccctgctctagactggatgcagttgggggaagaaggcactctgccagaatctaacctgtctcctttctagccctcctgctaaactgaacatgaatgaacaggcagttctgccttttaggattacaaaacatgagcaggaccctcccggtggaaacattaaagtcctgtggacttagaactgaaatgttggaattggtgctttgccactgacttacattttgatagaaggcaagttttagcctcttaggactaagagccagctctgtttcttggagggcccaacccataaaaagacaactgaagcagtcctttgttatttctttcttcacctccatatctcacacagacagagctgaggacaatatttggccttgccagtcagaccacgatgtcaaggagtgcctacaagccctgcctagattgctttttgctccaggtgtatgggggtcacgggacagcccttcgttcactggtagctttcacctgttcttccttgtgttgtcaataccagaagctgcaaaatgtcaactaccagaagaggcaagagggtgaggagttaggaagagagattagtcttattctttaagtaatgttcattctatttttttaattgtgatgaaatatacataagataaaatttaccattttaaccctttttttttttttttttttttttttgaggtggaatctcgctctgtcacccagggtagagtgtagtggtgtgatctcggctcactgcagcctctgcctcctgggttcaagtgattctcctgcttcagcctcccgagtagctgggattacaggcatgtgccaccacrcccggctaatttttgtattttttgtagagacagggtttcgccatgttggccaggctggtctcgaactcctgacctcaagtgatccactctccccggcctcccaaagtgctgggattataggcgtgacccactttgcccagccattttaaccagttttttaaatgtacggttctacagcattaagtacattcaaactgttgtgtagccatcaccacaaccatctctagagctttttcatcttcaccaactcaaacactgtacccatgaaataataagtctccattcctccctccccacagcccctgacaaccatcattctatttactttctctctgaattttttttttttttgagacagagtcttactctgcctcccaggttggagagcagtggtgccatctcagctcactgcaacctcagttttctgggttcaggcaattctcctgcctcagccttctaagtagttgggattacaggtgcctgccaccacacctggctaatttttgtatttttagtagagacggagtcttggcatgttgtccaggttggtcttgagctcctggcctcaagtgatccgcccgccttggcctctcaaagtgttgggattacaagtatgagccatggtgcccagcttttctctataaatttgactactctgtgaacctcatataagtggaatcataaaatatttgtccttttgtgattggcttatttcactcagcataatgatttcacgttttatccgtgccgtagcacgtggcaaaagttcatttmtttttaatgctgaataatattctgttgtatgcatacatctaccacaatttgtgtgtccattcacctgttgatggacacttgggttgcttccactttttggctgttgtgaacgtaaatgtacaaatatctctttgagatcctgctttcaattcttttgggtgtatacccagaagtagaaagtagaattgctgaatcctatggttgctctatgtttaattattttattttattttattttattttttgagatggggtctcactctgtcgcccaggctggagtgcagtggcacactctcagctcactgcaacctgcacctcctgggctcaaacgatcgtcccacctcagcctccccagtagctgggaccacaggtgcgcaccaccacacccagctaagtttttgtgtttttggtagagatggggtttcaccatgttgcccaggctggtgtcgaactcctgagctcaagcgatccacccacctcggcccaaagcactgggatttaaggcgtgaggcaccgtgcccggtcatctgtgtttaattttttgaagaatcgtcatacattttccacagcggctgtactattttacatcctcaccaatagtgcacaggagttccagtttcttcacattctcacaatacttttgttttttagtaacagccatcctagtcggtgtattggtgtgaagcagtattgcactgtggttttgattttgcattttcctaatgacaagtgatgtcgaacatctttttgtgtgcttatttgttgtgttcattttaaatgtataatttctcctttctcagttgattggccttggaatgcttgagcattaaggtgtcagatgttggctctgatcatttttttttaagaagtaaggtctcattatgttgcccaggcgggacttgaactcctgagctcaagtgattctcctgcctcagccttcccagtagctgagactactcgtgtgcaccactacgcccacctaggctctgatcctaacttgctataagctacttgtgtggcctataacctatagctgtttttttgagatgtagtcttgctctgtcacccaggctggagtgcagtggtgcaatcctggctcactgcaacctctgcctcccaggttcaagtgattctcctgcctcagcctcccaagtagctgggattacagtcacccaccaccacgctcagctaatttttgtatttttagtagagacagggtttcaccatgttggccaggctggtctcaaactcctgacctcaaatgatccacccacctcggcctcccaaagttctgggattacaggtgtgagccaccattctggcccctataacctatagctttctaaaccaaacgaacaaaaactctatctcatatataccttcttttggattttctttctttttgaagcaaaagtgaaatatccctgtaacctctctgggcttctgtatcttcttcaataaaataaggaaacccctaactgccctacccagctcaaagagctgttgtgagaattaaaggagatcagctctatgaaagcactttgtaaagattttataaaaatacaatttaggccatgcgtggtggctcacacgtgtaatcccagctttttgggaggctgaggtgagtggctcacttcaggccaggaattgaagactagcctggtcaacatggtgaaacccaatttctactaaaaatacaaaacttagccgggcgtggcagcatgcgcctgtagtcctagctacctgggaggctgaagtgggcagatcacttgagcttaagagttcgagaatcacttgaacatgggaggtggaggttgcagtgagctgagatcacgccaccgcactgtagcctgagtggcagagtcttagtctcaaaaaaagaaaagacattatcatcttgagccatcaaattcactgttactgaaattctttgctaaacctgaaggcaaaacaaatttagtctttttgtcttagaccaaaggctgtatgtttctttggtaggtaaggggaacagagcacaggtgacctacttactcatatctgttcatctcccagtatggggttgcctcctctgaactagggcaagggtcaagtctctgacttggtttttccctgaaaatggtcacaaagtctgctcagcattgtttagggatgtggatgcattggccccatcacctgcccatctaaagtaagcatgttatgtaatctaacaaatatttaccacttagcatgtgccagacaccagagttcatgcttccacatgcttcactaggttttacttaagcatatttttgcattactattgttttttgagaattataacctcccacatatattattttagttcatttaatcatatcttctaggccctttttctcctgttgtttctttgtttcaacaaagagaaatatttaggaaaggagtcccttaagattttacttattttaaatatttttagttattcagatgctaatctgaataactgaaagacatggaatatatattgagatttagatagagcatcattcatctactcaggaacagttgcagacaggtagaatctacattgacccaaacttcagggtggattgtgctttccagaaactattccagttaccaacagtcacctaattgagttcagaatggatgaataagaatggattttcctctctgtggcttcttgttttttgttttttcttttttgtttttatttctggaggtacatcagcatcctctctgtggcttctgatgcaaaggtaagctatatgctttttttttttttttttttttttggggagatggagccttgctctgtcaccaaggctggagtgcagtggcgcgatctcggccatttcggcctcccaaagttttgggattacaggtgtgagccactgcgcccaccctacatgaggtttttagaactcaaggagcttaatagggtcttccatttttagttgtatggtaggattagatacactgaacaaccttctcaaattaacacagctaaagtgctccctgtaggctgggcacagtggctcacgcctgtaatcccagcactttgggaggctgaggcaggtggattgcctgagctcaggagttgaagaccagcctgggggaaaycctgtctttactaagaggacaaaaaaaaaaaaaaaattagctgggtgtggtggcacacgcctgtagtcccagctactcagaaggctgaagcatgagaatcgcttgaacccaggaggtagatgttgcagtgaaccgatttcaccccactgatcagcctgggcaacagagcgacagagagagactgtctccaaaaaaataaaaatataaataaataacataaaatgctaactataatataacgcatcctgagctggcatgaaaacgagaaatctgcagatcttaagaactaaatgaacaaaagatttctgaaaagtaagcgagtgccaaagctggctggtgcttgccctgatgatttctgtcaagccctggaagctttgggcttactcactaaaaactgcttggactatggtgagcgggcctgaaagcgtggggtgcgccctaggtgaggaatgatgtaggaggccctgcctaaagctgggattccagctttaggaaacctcatggtgagcattttacgaccatgagctaaccctcacctgagttttgagtctgaattcatactacctatgtactctgaaaaaccttgagcagcagatggtttaatttaaagtgatctctgtgtctgacagtgtcccagggtaacccgcagaagcaaagacaagtcctctctggaaaaaagcagcttctactcaggccacaaagaattcccgtggatacagttccatggaaatcagcccacagcctttaatatacttaaagtaaataattatcattcccaaaaaagctaccttgtaaaggataaacaaaggtgaccaggcatggtgggtcatgcctgtaaacccactacttagggaagtcaaggcaggaggatcacttgagctctggagttccagacccgcccgggaaacatgatgagaaacccatctctacaaaaagatttraaaattaatggccaggcgccatggctcacgcctgtaaccgcagcaygttgggaggccgaggcgggcagatcacctgaagtcaggagtttgagaccagcctggtctygaggtcaacaaggcgaaaccccgtctctactgaaaatataaaaattagctgggcgtgatggcaggcacctgtaatcccagctactctggagcctgaggcaggagaatcacttgaacccgggaggcggacattgcagtgagccgagatcgcaccattgcactccagcctgggcaacaagagtgaaactgcatctcaaaaaaaaaaaaaaaaaaaaaaaaaagcggccgtggtggcatgcacttatagtcccagtacttgggaggctaagtggggaggatcccttaagtccaggagtttcagccttcagtgagccatgatcctgccacttgcagccaaaactgatcaaattgtacactttaaatatgtgcagttttagtacacttcagttataccccagtacagttgtggagaaaaaaatctaaaagaatacttttaacccctttagcttaaaaagatacaatttattatttcctaactacaaaataagagtgaagatgttttaataccctttttaaattttaatcaatttattgagatatgattcacattccatgaagttcaaccttttaaagtacacaattccgttgtttcattatattcatagagcaatacaacaatcaccactaatttcagaacattttcattacctcataaagaaaccctctacctatcgcgtcatctccattttcccttcttcctagcccctgtcaaccactagtttactttcagtctctctagatttgcctcttctgcttctttcatatgaatgggatcatataattatggccttttgtatctggtgtcttctggtttgcttaatgttttaaggttcatccatgtcacagctcatatcagtacttcattcctttttatgcctgaatcatattccattatatggtaattccacatttgtttatccattcatcagtttcataaacatttaggttgtttgcattttttggctattatgaataatgttgatatgaacatttgtgtatgagtttttatgtggacatatgttttcatttctcttagatatatatacctagaagtagtattgtttggtcatatggtaaactgtgtttaactcttggaggaacttccacactagacagttttccaaagcagctgcaacattttacattctcactagcagcaaatgtatgagggttcaatttccccacatcttcactaacacttattattttttttattatagccatcctagtgtgtgtgaagtggtatctcagttgtgattttcacttgcatttctcaataactaatgatgttgaacagcttttcatgtgttcagtggctgttggtatttctttggaatactgttcaaatatttgcctacttttttttttttttttttttttttgagacagtgttttgctcttgttgcccaggctggagtgcaatggcgcaatcttggctcaccgcaacctccgcctcccaggttcaaccaattctcccgcctcagcctcccgagtagctggggttacaggcatgcgccaccacgcctggctaatttttttttttatttttagtagagacggggtttctccatgttggtcaggctggtctcgaactcctggcctcaggtgatccgcccacctcagcctcccaaagtgctgggattacaggcgtgagccactgtgcccggccatatttgcctacttttaaaattgggttgtcttttattgttgagttgtaggagttcatagatagatagatagatagaaagattacattgagttgtaggagttcatagatagatagacagacagacagagagggtctcactgtgttgcccaggctggttttgaactcctgggctccagcgatcctcctgccttggcctcccaaagtgctgggattacaggcatgagtcaccacacccagccttgagttgcaggagttctttatagattctggatacaagtcctttatcagataaatgatttacaaatattttctccctatgatttgattgtccttgcactttcttgaatgttttaatttttacgaagtccaattaatctggtttattttattttgttacttgtgctttggtgttataaagacatttttaaacaataaggactgggagaagctggtgtgcgcctgtattcccagccacttgggaggctaagacaggaggatcactggagcccaggcattggagtccagccatagtgagatcctgtcctcccgccaaaaacaaaaacaaaacagagtttatcaccaaatatcctcactaaacgaagtttcttctacctgaagtacacacttcagaaaagtatcctagattccaaagaaatggtaaacagtgattgtaactataaaattggatcagattgattacaaaggaaccatggagttaaaagcttccttagaagacatcagggccagtctcttatctaatgaaaaaatagtcctccagttttctcaatggcctctgctccagatgcttccccagaatttactctattatgagacagtcactataaaaagttcctcctcargctgagtgaggtggcttgtgcctgtcatctcagcactttgggaggccaaggtaggaggagcacttgagcccaggagttcaagaccagccatgcaacatagcaagaccctgcctctgcaaaaaaattttttaaaaattagcgggtatggtgtgcacacctgtggtcctagccattcaagtggctgaggcaggaggatcacttgagcccaggatttcaaggttacagtgagctgtgattgtgccactgcactccagcctgggtgacagagcaagaccgcatctctaagaaaaaaaagttccttctcaaactgaacacagcctgccttcctgtaattcccacttaatgattttttaaaagttttctcaaaatcacaaagtctgttttttctatrtctgacacaccttagttatacttgaaattctctttacgttttcttttctctaagctaaacaaaccagtgcaatcaaatagattcttggccagtgctgcgaaatattataggactttatgtaatgatgcagtgtttagtactgtaatgatggaaagttactatttccacaccatcctctatggtagccactggccacatgtgacttttgaatacttgaaatgtggctagtgcaaccgaaaaacaaatcttaatgtagttaaattgaaatatccacatgtggctagtggctactgtattaaacactgcaattctagatcattctcctggccagatttctctgtgccattaccagcagcatcagattcacctgggaacttgtaatgttttaggccctacctcagccttttgaatcataaacagttgagggtggagcccagcaggctcatttaacaagctctccaggtgattccaatgcactaatacttgaaaggcaattccagtttgtcaaggcttctgtaaaaagcagtgctcagacaaggtctgacatgcatggatttcacctaaagacagcttcaatggcttttttttttaattgaatactactttctaaatattgcattgactgcatgttataaaaatgaatacaatgtggatatgaagaatttttttttttttttttgagatggartctcactctgtcacccaggctggagtgcagtggtgcaatctcggctcactgcaacctccgcctcccaggttcaagcgattctcctgcctcagcctcccaagtagctgggacaacaggtgcgtgctaccacacccggctgatttttttgcatttttagtagagacaggatttcaccatgctagccaggatggtcttgatctcctgacctcaggatccacccaccttggcctcccaaagtattgggattacaggtgtgagccatcgtacccggcctggatatgaagaatttaaaaaaataaagtgtcaggccaggtgcagtggcttacgcctgtaaccccagcactttgggaggctgaggcatgcagatcacttgatatcaggagaccagcttaggcagcatggcaaaaccccatctctactaaaagtacaaaaactagttgggcatggttgcacatgcctgtggtcccagctacttgggagtttgaggtgggaggatcactggagcctgggaggcggaggttgcagtgagccgaggtctcactactgcactccagcatgggtgacagagtgagaccctgtctcaaaaataaagtgccccttaacagtttaaaaaaaattagttaacaggcagtttcccagctgggcgtggtggctcacgcctgtaatcccagcactttgggaggctgaggtgggaggatcacatgagctcaggaattcgagagcagcctgggcaacatggtgaaatcccatctctactaaaaatacaaaaattagccgggtatggtggcatgcgcctgtaatcccagctacttgggaggctgaggcaggagaatcgctcaaactcaggaggtagaggtgacagtgagccaagatcacaccactgcactccagcctgggtgacagagcgaaactccatctcaaaaaaaaaatttgtttgttaaatgtcttggcacagtggctcacacctgtagtcccagcactttgggaaccaaggcagacagatcacttgcggtcaggagttcaagaccagcctggccaacatggcgaaaccccgtctctactaaaaatacaaaattagccaggcatggtggcgcacgcctgtgatcccagctccttgggaagttgaggctggagaatcgcttgatgccgggaggccaagggtgcagtgagctgagatcgcgccactgcactccagcctgggtgacagagtgagactccatctcaaaaaaaaaaaaaagaaaaaagcaggcacttttccataagtttcacacggtcttatagtactagaaccctgagctcttgattgtcagtctggcgtgctttccatctcttaggctgtttggtgaaataggcctcactgtttggtttggtgtctcccagaagagaaaaatctggttccttggcatttattttacctaccccatttgggggctgtttcttctgccttttcttgcacaacttccccattgttagatgcctctgtagtcactcccaataccctggaaacatctcccttttttagggtttaacagacttcacctgtatagttactgtcttttaataygactttcgtcctcttatgcttgaaacctagaagaggagctggcttgttctgctggccttgagccagatgtcataacttcaggcagtgccacgctacacatctccagcagtttggaatggagaacagagttagagataagatcagcagctttaggtgatggctttgtttcaaataaaccatgcatgacccaagcctccacttcaaatggggaatgaaattgctttatcctttgacagcttgctctatgaaatacatttatcttcacttaattgctttagatcccaagaggctacatacagtaatttctaggagataattatatcaaattttaaaaatatgtgactgtggacatgaatatgtaactgcagtggacagggagggagagaggtgggggaaaccaaaagtcctgctgaccttgctggtaagtttccattcttattcttagagtttccttgggtcatagaccacttactctctgaatctgctgattcatatgtggggtcctttgtaccccatgctgctagggttaaagcatctggtctactactcctgtagctggatagtgttttgctcagtctcctcctgaaactgggaggggtcaggctggtggctgacttccggttatatgtcttcatttagtctggctgggcacagtctgtctacactgtaggccacagccactgggggttctggttagtggcagctgagaaccagcaaacttgttgattttaaaacatgactatttagatgtcagggataaacttcctgtagatgggggacaggcttctttatcttggagtgtttgagtatccagttctcatttccctaacctttacatttgaaaaaatctaaagctttcactgtcattttcactaatcccagccactgcctacctttaccgtatattttttttcttctttctgaaattccagggtgttttttttttcctgcctcctactaaataactgtatttccatgttgtgatataacaacaccaaaggcattttccaggtgtggacacagytctgggccatcgctcagctctttctgtctgcatctgcctttaagactacacactggacaattcgattgtgagctccgtgatactactctccaaccgccatccccaagtgtctagtgtggtgctcatgtcttatgagggctgtgtgaggaagagccagtgaggcctagctgaatgacatggttgacaggcactcctgctgtaaagacaaggaagatctgacttggagatacagaggacatttggattctgtactaaggtccatgaatatctaagccagcttgcgggtgggggatgtgccaaaaccaatcaaggtgggctgactgaatcagagaatctatagagccaaagactttcaattcccatcaagttctctcaagacctagtcccatggcgctttctgcttgcyggggtcattctccaggtgtcttttatcccttcattctcacttaatcagggtcagccacactcctcagttcactgagagggaagtgttgccttttcttttaaactcctccccgagaaccctgacagctgtgatgagtaagcccatttgcatgtgaaaggtcctgctggcgtgcctgtaagcgaatctgcagcgagtactgtcacaccatttcttggagtcacatcaaggagttttttaaggaatgacactttggctcacatcgaaaacatgagcacctgaatagcagcctgtgggggtcatcaaggttagggtgtttgttctagtgtgtttcttttgagctggaaaaacatttctccgtatatcaccacttttggtactcccttctggagagttgcttttctcctgtctacctattagtgtggtagtagtaacctgtaccaagaagcgttccgtggttagtaacctgcattcaaaccatttcttttagctggatcctttttttgagtcagggtctcactctgtcacccaggctggagtgcagcggcgggatctgcgctcactgcaacctccacctcctgggttcaagtagcgatcctcctacctcagcctccaaggtagctgggactacaggcgtgtgccaccatgcccagctaatttttttattttatttttttgtaaagaagaggtctcaccatgttgcccagcctgttcttgaactcctggctcaagcaattctcctgcctcggcctcccaaagtgctgaaattacaagcgtgagccatcatgcctgaccttaatttgatctttcaggagcagaacatgcctgttttttcttgtgttttatttaataaaaagaacatactaaacttatgtaaggacttaccaagaaggataattgaaattctggtgtctttagacaaaaaagctaaaaaaaaaaaaaggaaaaaaaggtgaggccttttcagggattgaatcgtctttggtgcattttttggtgaattccatgaatccagctattttggtgtattcagtaaagttttccctgagtttgacttaggactctgtgtgcgtatgcgtgtgtgtgttgaacatatgtgtctattcctctggaaagatcattaaatccaaattctgaatagggaaatggagactttccaaggagtgtcaggagcaggcgaaaaggaaacattttgccacagatatttagaatcaatgagatagatgagatagaaatgaagaaatgccatgatttacttctatttcttagagctcactgtgtggttgactgataacagtcactagccacatttgtctacttaaattaattggccaggcgcagtgactcatgcctgtaatcccagcactttgggaggctgaggtcaggagttcgagaccagcctagccaacatggtgaaaccccgtctatgctaaaaatacaaaaattagccaggcatggtgtgcatgcctgtaatcccagctactcaggaaactgagacgtgaaaatcgcttgaaccccagggcagaggtttcagtgagccaagatcacaccactgcactccagcctgggcgacagagcgagactctgtctcaaaaaatatgtatatatttatatctgtatatatacacacacagacacacacacacacacacacacacacacacacacacacacacataaatatatatataggctaggtgtggtatctcatgcctgtaatcccagcactttgagaggccagtgtgggaggattgagtccaagcgttcaagaccagcctggacaacatagtgagattccatctctacacaaaatttaagttagctgggcatggtggtagcgcctgtagtcccagctactcaaggggctaaggtgggaagattgcttgagcctgagaggttaaggctatagtgagctgtgattgcaccactgcactccagcctgggtgacagagtgagaacactgtttcaatcaatcagtcaaaacttagttaattaaaattaagtaaaattgaaaaatcaattcttcagtcacactagtcacatttctagtggtcagtaaccacatgagactaatgggtactgtattgtcaagcataatatagaacatttccattattgccataaggttctcttagacagctttgctttgtgataaagtcactaagtataactcagtttttaagattggggttggtgggggtggacggggaaagaggagacgttgggcaaaggatacagagtttttattagacaagaggagtaggttcttgtgatctgttgtacagcatggtgactagagtgaataatgtatatttcaaaatagcttaaagaatagatttttaatgttctcaccacaaataaataagtatatgagatgacgaatgtgttacatagtccaatttgattgttccacatgtatacatttatcaaaacatcacattgtgcttcataaatatatacaattactatttgtcaatttaaaataaaactattaggctgggtgcagtggctcatgcctgtaatcccagcactttgggaggccgaggcaggtggatcacctgaggtcaggaatttgagaccagcctcgccaacatggcaaaactccatttctactaaaaatacaaaaattagccaggcatggtggctcacgcctgtaatcccagctagtcgggagcctgaggtaggagaatcacttgaacccaggaggcagaagttgcaatgagccgagttcgtgccacggaactccagcctgggtgacagagtgagactctgtctcaaaaaaaaaaataaattaaaataaaactttttaaaaaaggtctgggatgatgacagggaggatattgagagggagatactaggatttgaatagctaaagccatttaattaggaatgaatcagcatcagaagccatggacttcaaagagtggaaaattacaagattcctactgagataatttagtagtgtatttagcaggattcagaatattatctccaacatgatcaattttcatgaccttctataaggaatttgtctactcttataaacagcctcctttcatagacttcttaaaaagtgattttgtctttatgccttcattgttaacacttgcttttccaatctcagtgtttcattttcatagataaaacttacatcagcattttccgtagtgctatcatgatgtattatttcatttgatttccactacagttctaggaggcattatctttttttttttttttttttttttttttttgagatggagtctcgctcttatcgcccaggctcccaggttgtaggcacgatctcggctcactgcaaccttcgcctcttgggttcaagcaattcgcctgcctcggcctcccaaattgctgggattacaggcrtgcaccaccatgcccagctagtttttgtatttttagtagagatggggtttcaccgtattggacaggctggtctcgaactcctgaccttgtgatccacccacatcggcctcccaaagtgggcattatcacattttacagctgagaagattaagacttagactgatttatctgagatcatatgrcaatactaggtcagaacccagaactatcattttgtattagatttaggtgaataagaggcctaaacatacagttttatcctcttacatcaagagtctagacataggcagtccagggctagtgttcgggctctaccacttggcttccccaagttggcagacactggaacctccagctcagtatacaacatcctacaatgtggtcccatcccaagatggttagtagagcatcagcaggcagcttaatggaggaagaaaacagaaagggtatgccccatatatttaaagagacttcttcaaggttttacgtaaaagttctrtttacatctcaagagtcacatggctatcctacctgcagaaaaagctgaaaatatggtcacctggctggcagaaatgtatccagctattagccacatgtgttagcacgtacctgtaatcctagctactctagaggctgaagcaggaggatcactggagcccaggagttctaggctgcagtaagccatgatcatgccaccgtatcccatccctgggtgacatattgagaccctgtgtctaaaacacacacaygcactcatactcttagctaaaaatcaaagttattttgctaaagaagggaagactggattgggaggtaactagcaaactctgctccaggaggtgttttgatatttagtctagcgctttcccactgtttcatattgtctctgacttgttatgaaggctgccattttttccaaagaattaaacayaagttctctctctcccagatgaataattacagtaaaagctacagtttactgaggacttgctttgtcttagatattattctaagaattttacgtttttaaacttttttttcccccccagatggagtctcgttctgtcacccacactggagtgcagtgacgccatctcgctcactgcagcctctgtctcccgggttcacgtgattctcctgcctcagcctcccgagtatctgggactacaggcatgcgccaccacgtccagctaatttttgtatttttagtagagacagggtttcaccatgttgaccaggctggtctcaaactcctggcctcaagtaatccacccaccttggcctcccaaagtgctgggattacaacatggtgaatccccgtctctacaaaatatacaaaaattagccagacatggtagcacgtgcctgtagtcccagcttcctggggagtgaggcagggacattgcttgagcctgggaggtygaggctgcagtgagctatgttcccaccaccctgagtgacaaaatgagaccctgtctcaacaacaacaaaaggcagtatatttaatgtgccttcttgtttttctcttcactgtcccctttcttcttctgtcactctctcagacctgaggctaggaaaagagattgacatgctttaggtttttagaaagtttagttcctgtacctcatgtaggaacttgcatgagaaaattgtgctggggaattaatgagatgtctgcagagaatccagaggctcaaagtttctatatcttgttaatagaaatttgatttccaaatacaattttgtattttctcttcactcccactccctctggtactcttatgagttgtagcaggtaagagcaccatccactgatcgtcccacaccgcttccccatagacaactcagtgagaaccggcacttgaattgacagtccacatgtagactgggcttctctgccagggtgacgcatctgctgttaagttgctctgaggcttgacttctcgcgttcattcaacattagatatttattgaacacttactatttaccagrcattcacagtgctagggattttgtggtgaatgagacaggcatagtctcttacctcatagattttacattccagttatggggatacagagcaaagaagtaaagaaataaataagcaaaataaattcactgggcgtggtggctcatgcctgtaatcccgacactttgagagcccaaggcaggaggattgctcgagttcaaaagttccttttttttttctttttttggagacagagtcttgctctgtcacccaatgctggagtgcagtggtgccatcttggctcactacaacctccgcctcctgtgttgaagggattcgcctgcctcagtctcccgggtagctgggattacaggtgcccaccaccacacctggctaatttttgtatttttagtagaaacggggttttactgtgttggccaggctggtcttgaactcgtgtcctcaagtggtccgcctgccttggcctcctaaagtgctagaattacactagaattacaggcgtgtgccaccgtgcccagctgrttggtttttattgatttgcaagtctgaatatgaatctttgtcagctatgtgcattgtggatcacccagtttatagtttaattttaaattaatttacagcattttctttgcataaaaatttgtgtgacaaatcagccatttcctttccagtttatgtcttatttaagaaatcctttctggctgggcatgggggctcatgcctggaatcccccagcattttgggagaccgaggtgagcagatcacaaggttaggagttcaagaccascctggcctatatagtgaaacccagtctctactaaaaatacaaaaaaagttagctgggcatggtggccaggcacctgtagtcctagctactcaggaggctgaggcaggagaatcgcttgaacccgggaggcggaggttgcagtgagcctagattgcaccactgcactctagcctgggtgacagagcaagactccgtctcaaaaaaaaaaaaaatcatttctgagtgtgcaatattggccatatattgctaaatgttgaagctaggtgatgatagcaggtttatttattacactagtctctagtctctccttttatatatgtttgagattttccataataaaattttaattaaaacaagaccactggcattcatttaatagcaaatatgcttaaagttttattgtatataaaaatcaattgttttaataataagccagagcttataatttggtggggtaaaagggttacttttatctctgtgcaggagtttgtcatttgatctttttttaaagacggagtcttgctcttgtcgtccaggctggagtgcagtggcgtgatctcggctcactgcaacctcttcctcctgggttcaagcaattctctgcctcagcctcctgagtagctgggattacaggcacctgccaccacgcccagctaatttttgtatttttagtagagacgggtttcaccatgttggccaggctggtgtcaaactcctgaccttgtgatccacccgcctggcctatttgatgtttttttttttttaaaccacttgattgttaggttaaaatattaccaagagtaattgcaattttacatgaaaaaaaaggaaaccttacataccctgaggtcataaagaatatataccaacatatttttcttctaaaagttttagttttactttaaatttttcttctgaatatttggttttcattttggttttacatttatgtctttgttccatttggaatttattttgtaaagcaggtttccctgtttcctagtcctctgttctgttccattgagccagtgagcaattgccatatttacaatatttagtcttcccatccatgaacatgatatactgttaatttattcaggtcttcttttatgcccttcaaggatgttttgtaatatttcccataaaaccctcgcacagattttgttactaatttaagtatcatattttctagttaactattaatggtatgaatataaatgctgtttcttttttttttttttttttgagacggagtctcgctctgtcgcccaggccggactgcggactgcagtggcgcaatctcggctcactgcaagctccgcttcccgggttcacgccattctcctgcctcagcctcccgagtagctgggactacaggcgcccgccaccacgcccrgctaattttttgtattttttagtagagacgggatttcaccatgttagccaggatggtcttgatctcctgacctcgtgatccactcgcctcagcctcccaaagtgctgggattayagatgtgagccacctcgcccccagcctaaatgctgtttctttatcttcatcttacatctatcaactttactgaactgtcttgttctataatggtaaccataataatagaaattctatgtttctaactttaatagcaatgcttctaaagttacattattaaatctatttgtcatggatttcttttttttttttttttttttgagacagagccttgctctgtcacccaggctggagtgcagtggcatgatctcagctcattgcaacctccacctcctgggttcaagcgattctcctgtctcagcctgccgagtagctgtggttacaggagcgcaccaccacgccaggctgatttttttattttaagtagaaacaggatttcaccatgttggccaggctggtctcgaactcctgacctcaagtggtctgcctgtctcagcctcgcgaagtgctgggattacaggtgtgaccaaccatgcctggcccatagatttgtgataagtgtatcttgtcatgttaagaccattcgcttctattcctagattgctgagtattttctttaaatcacaaataagggctgaattttattaaatattttttcttaatctgttgatgatagtgtagtttttctttttaacctgtttatatggggttacacattaataatttttttaaaataggttcttattcccattgcccaggctggagtacagtggtgcgattatggctcactgcagcctcgacctccctgggcttgcccctcccacctcaccctcctgagtaactgagactatgggcatgtgccaccatatctggctacttttttgtatttttaataaagatggggtttcgccatcctgggctcaagcgatccgcctgccttggcttcccaaaatgctgggattacaggtgtgagccaccccacccagcccagtaataaaattctaatttaaaactatcattttcttcctaaaatagtccagtgtactctcccaaacttcaaaatgagcatattcttgactcatagttgtttcatgggagataacatatttctttcattttcttaaaggtttttactctgctgcttgcatgccattttctttctttctttctttttctgtctttttgtcttcctctttctttctttctttctctctctctctttttttttttttttttgagtcttgctctgtcacccaggctagagtgccgtggcgcgatcttggctcagtgcaacctccacctcctgggttcaagtgattctcctgtctcagtctcccaagtagctgggcctacaggtgcacgccaccacgcccagctaatttttgtatttttagtagagacggggtttcaccacgttggtcaagctagtctcgaactcctgacctcaagtttgcaatagtgggtatacaatgcttggagaggctgttagaataacaaattggcaggatagtggcatacagaatacagcataaggcagttggattggcgtataggttaataccgttgacatcagaatccggtggtttttaatctaactctagagccatcctgtccagtaccactttctgcagtggggaaagtgttctacttgacaccgtctagtatggtaactactggccgcatgtagctgttgaacacatgaaatgcggctggtctacctgaagaaatgattttttttaattgtggtaaaatatacacaacataaaatttaccatttcgtgccctccctgcacttgaccgccgcygctccgtgccggcagcctggggactgggagcactcrtgccttgggtatgccgccccactggctggacaaagcggcgcgtggatgtgcctgtggggccttgccctgggcatcgctgctgctgccagcgcccttcacccatgcttcagcatggtgccyatackcacttcctgcaggagtctgctggatacctgcagctggagcacaggagagatttcagctcttctgggagtaggaagctctcctttgacactcgttccttagtgtgctttctggaagaccatgggtttgctactcagcaagcagaaatcattgtgtctgcattggtccaggtactggaggccaacgtggacatcgtctacaaagatatggccaccaagatgaagcaggagatcgctcttcagcaaataatgtctcagactgtgaatgtgaaaaacgatatgattactttggagaagagtgaattttcagccctcagagcagaacgtgagaaaataaaactcaaactacatcagttaaaacaagtaatggatgaagtgattaaagtccgaacagatactaaattagacttcaacctagaaaagagcagagtaaaagaattgtattcgttgaatgaaaggaagctgctggaattgagaacagaaatagtgacattgcatgcccagcaagattgggccgtcacccagagagataggaagatagaaactgaggatgctggccccaaaaccatgcttgagtcatacaagcttgataatattaaatatttagcagggtctatatttacgtgcctaacagtagctctgggattttatcacctgtggatctaataaagtgtctatttaaagagggggggaaaaggatttaccatttcaaccatttcttaagtgtacaactcagtggcattaagtacattcacagtgttgtgcgaccatcactactatccatttccagaactcttcatcattccaaacgccgtaaccattacacagtaactcctcattcccccttcccctggcaacttctactttctagctctatscatttccctattgtaagtatctcatataagtagaatcatgcaatatttgtctttttttttttttttttttttttgagacaaggtctctctgtgttgcccaggctggagtgcagtgtcaccattacggctcactgcagcctcgaactcccaagcccaagggatcctcccacctcagcttcctaagtagctgggaccacaagcacgtaccaccacacccagctaattatatgcacgcgtgtgttcacgcgtatatgtgtgtgtgtgcatgtgtgcgcatgtgtgcatgtatgtttgtgtctgtgtgcatgtgtgtgcgtgtgtgtgtagaaatagggtctccccatgttgtcaragcttctcttgaactcctcrgcctcgagtgatcgtcccaccatagcctcccaaagtgctgagattactggtgtgagtttccacctttgatgcacaaaagtgtttaattttgataaagtccagtttgcttttttttttttttttttgaaactgagcctcactctgttgcccaggccagagtgcagtggcttgatcttggctcactgcaacctccacctcccgggttcaagtgattcttgtgccccgcctttcaaatagctgagattacaggggcccacctggctagtttttgtatttttagtagagatggggtttcaccatgttggccagtctggtctcaactcctgacctcaagtgatctgcctgcctcagcctcccaaagtgctgggattacaaatatgaggcactgtgtctggtctgcttatttttttcttttgtttcctatgcttttgatgtcatatccaagaaatcattgccaaatccagtgtcataaagattttcccttatgctttcttctaagagttttctagttttagctctttttaggtctttgatccattttgaatttgtttttgtatatggtcttaggtaagggtycagcttcattcttttgcatgtgaatatccaggtttttttaagctctttttattgaaaagactattccttccataagattggaattggtcttgacacccttgtcaaaagtcagttgaccctgtatttgtgagagtttacttctaggttttctgttctattctatgccagtaccacaccgttttgattagtatagttttgcagtaagttttgaaatccagaagcatgagccctttaacttttgttctttttcacgattaatttggctgtatggggtcccttaagattccatatgatttttttttttttttttttgagatgggttctcactccatctcccaggctggagtgcagtggcacaatgtcagctcactgcaacctctgcctctcaggttcaagcgattcttgtgcctcagcctcccaagtacctgggattacaggcatgcgccaccacacccagctgatttttgtatttttagtatagacggtgttttgccatgttgaccaggctggtctccaactcctgacctcaagcaatctgcccgctttggcctcccagagtgctgggactactggcatgagccattgcatccagctagattccatatgaattttaagatgtttttatggatcygtggaaaatgccattgggattttgataggaactgcattgaatctgtagattgctttggttactgtagtcagcttaacaatattaagtcttccaattcatgaacatagaatgtttttccatttattggaactccgtttttaattatattcaattttaggaaatttaaatttgtttggccatattgtagctaatcatcatcctattggccagcaagcccaagagaattatcctcagattttcttttcttcctaaatcgtaggatcgtagtgacgtcttcagaggccttgtagtatctgaatcatcattggtctcaggatgtctggattgtatggaatgcatggttagaagggtgaataaatagggggtttcggtccctccaggttatctctgtctcggagatatgagagggctacaagtcttgccacatcagaccctgtctccttctctattttccctttggaaatgtctgtttttctccagagccaaagagaacctcttgttttccaaaaaattagcaaaaagtagactctgctctggcaggaatggaactccttctgcctcttcctatttccatagaagaagagaccatagtgccccaaatgaggtgtttttaaaagaaattccttctccaaatggagatgctgattattttatagcagcgtatgtaccttgttcatcattctgatggggttctcatgggaacagcaacaaaaaatgcctttcggtgccaatcatggttgtgctcccaattgcattttccttgagggtcagcagtctaagagatgcctgcacgttagaaacaaaaaataaagaataaacgcygtaaataattaattaaaccaggaaaccccctttcagtgtccattcgtttttctgccatgtaagaagtaatggtaggatgcggaagacctgtgtccttagtactgttccgtctccctgctgccccttccccagcttctctctaatgactccccggggagatcacaggtctcagagtaaacaggaaacctgactaagtaaaatagggagtcttagagcctagagggtaagagacacagctctccaggaagaagatgcctttggccttggacagccaggagcagtgggtttgtggggttttatataaacactctgttacgactctctgcggaggaaccctccaatccactttaggccagaaatggaactttgttccctggcctgcccatgactactctacatcagtctctcctgaaaagaggctagaatattacttgtgtattcagaattggactaacccagtarttagccagttcgctaaaactgatttctctaccttactgccctgtggcctgtaccccacccttattgtcacccctttctttgtacagagataacttctttactgtagcatttgggatttcccacactacagttgatctgtcaccgcactaccaaaatgcctctgccaaccacttgggtgtcctggtgtcagaagttagaagtgccccaactgtcccacccagcctgctcagctctcctctctctctcctgggttgttgttctggaatgatattcctcttggattcagtgtgtgcagtctgatttgggtggagccttgagctgtacacaggagtgctggtaatgtctggccttcagtgctgccaaaggcaagaagctggcctctcagtgtaaagcacatagttggattgctggggcagtgttaaatggagggtggggtgagcagatagcactctcttcctgctstgttttcaggaagtgattataaaagcagctctaagtttgaatgaaatcaaaagaatgaattgtcaccttcccccaacaaaaaccagatgagcacaaacatatacacaaacacactcctcctctgcactccatccaagatccacaccctggctctgccgggcttcacttcggtgctatttcagagcaaagagcctttgttgtgccatctccattctcttccctgggagagagcttagtagtcttatgaatgagagctcgacttcccttttggcatactgtgggtttcacttccctgtcctctctccttccaagaagagtgtgggcagaagtgtataggtgggaggaataaccattgccaagatttaattcatcagttagggattggggtttcagaactggtaataaaattgtttgcagttaattgtcaatgaaaggagtttctgtgccgttaacacacttccattccttccttccagctgcctctttccgtcgtactgcctttttcctggtacctccatggggtttaagccatatggctcttaggaatatcgtttggagtctccagaagtggaagatttggctgtgcagcacacagcacccctgggtctactcctcccctcccctctcagcagctgtttgccactgaccgaggtggcgaccaagcctatgtgtgtggccagagtcagtgacaagcctcccacccaggcctggggaagcccttagccagcgcggttcctgaggcagccgccaacacgccagggtttcctcataccttcagggctgcggtggagcagccagcgttatgcggcagcattgtctagcgttgcttcacttgacttctctgtccccaccctctgtgtttaagggaatctggccatcatccagcagggaagaagctggcatttacagagagtggctttctgccacccctcatgtggtaggagccaggaccacctccatctctgcttcctacccatgtggcaaagaggaaggggcccctctgtgctcagtctcctgttgtggagtttcgagttgcctaagatgagaataaggctgtctgccaggttatctgcccagataaacatttattgtttacagggacatgtttcagctgctctggcacctcccactggtgagatcctctagtatcttgaggttttaagccagtatatggggccgacgtccagacacagaactactggagctggagaggctaagtggctcgcggcttctaacttagcttcgccattgccccccgccccgcttcccactgccagagctagatttacatctcttgttcttagttctgcctcctggatattgaagctgcatctacattttaaacctttctagcctttagaatttggggatttatatgcgatccagtgttaggacacagcaagctgaagacttcttttacatggcaaaaccagccctctgacactgtgttttccttaatagctaatgagacagctgtttagtgacggcaacagggattgatgcagattttctttttttaatctgactaggtccactgcttccagatattgtctttttatttttttagtgatgtgattgattttccaacattttattatacagcaaagttgaacattctccagtgagctcacttatacscagtacctacatgctgtgattctcattttactgtatttgtcttatcatgttatctgtttatttctctctctccctctcttcccccrtctatccacccatccatccattttttcttcttttaaataatttttttaatgcctataatcctagcactttgggaggccaaggcgggcagattgcttgmagccaggagttcgagaccatcctggccaayatggtgaaaccccgtctctactaaaaatacaaaaatgagctggatgtggtgacgggcacctataatcccagctattcaggaagctgaagcatgagaattgcttgaacccaggagggcagaggttgcaatgagctgagattgcgccatgcactccagcctgggcgacagagtgagactatctcaaaagaaaagaaaagaaaagaccagcctgggcaacatggcgaaaccccatctccacaaaaaatacaaaaattagccaaatgtagtggctagcacctgttgacccagctactcgggagagctgctttagtagcccaggaggtcaaggctgtagtgagcccaaaatcatgctactgtactccagcctgggtgatactctctctctctctacacacacacwcacacacacacacacacacacacacasacacacacacacacacacacagacagacatgtacatatatacatatatgtgtgtgtgtgtatatataaataatcatataattatattataatcccttatctccacctctgtccccagaggcaagctctgttctgattttttccaccaagattagatttgcctattttagaaccccatataaatggaatcacacaataagtacatgctcttgagaaaggcttttttcatttagcttaatctttttgagattcctctrtgttgttacatatattagtatatattagtagctcactcctttttatygctgagtagtattccattttatgaatatgtcacagtttatctggttgacagtgaatctgtttctagtttttagctgttatgaataaagttgctgtgaatagttgtacacaaatctgtttttggacatgtgttttcacttgagtaaatgcctaggattagaattgctgagtcagagattagatgtgcattttttattagagatcccctggaccaagcttgtccaacccgtggcccacaggctgcacgcagcccaggatgctttgaatgcagcccaacacaaattcgtaaactttcttaaaacattatgagcttttttgccccccgcttttttttaagctcatcatctatagttggtgctattatattttacgcgtggcccaagrcatttcttccatcgtggcccaggatacccctgccctacagctttttccaaagatgattttgttagactccaacaattatgacacttcccattgcttcacatcctctttctggtaggtgtgtggtgactggtgatatatcatttttggctttaatttgtatctccctgatgactaatgaagttgtatrctttttgttttttcagacagggtcttgctctatcacccaagccaaagagcagtggcacaatcacrgctcactgcagacttgacctcctgggttcgggcaatcctcctgcctcagcctctcaagtagctgagactacaggtgtgtgccaccacattgggctcattttattacaattttttgtagagacaaggtattgctatgttgyctatgctggtctccagcttctgggctcaagcagtcctcctgcctcactcgtccaaagtgctaggcgtgagcccccatgcccagctgaagttgtatactttttcatatgcttactgacttttttgcctatcttccttatgaaggatcttttcacatcttcctcccattttcttgagttattttcttgttgagttccttatgtattctggatgtaagtaatttgtcagatacatgttttgtgaatattttcacaaagcctgtgtcttacctattcattttcttaatatcttttgataagcaaaaggttttaattttcatgaaatcaatttatcctgcttttcttttatggttattactttatgagggctaaaaatcccaagtgatgaggatcttctactcggttctcctctaagcgctgtatggaggccgggcgcggtggctcacgcgtggaatcccagcactttgggaggccgaggtgggtggatcrcttgaggccaggagttcaagaccagccttaccaacacggtgaaaccgtttctctactaaaaatataagacgttagctggacatggccgggtgcagtggctcatgcctgtaatatcagcactttgggaggccgaggcgggtggatcgcgaggtcaggagatcgagaccatgccggctaacacagtgaaacctggtctctactaaaaatacaaaaaaattagccaggcatggcagcgggcgtctgtagcccaatctacttgggaggctgaggcaggagaatggcatgaacccgggaggcggagcttgcagtgagccgagatcacgccactgcaytccagcctgggcaacagagcaagactccgtctcaaaaaaaaataaattagctgggcatggtggtacatgcctgtaatcccaactactcaggaggctgargcacaagaatcgcttgaacrcaggaggcagaggttgcagtgagccgagatcgtgccactgtactctggcctgggcaacagagcaagactccgtctcaaataataataataaataattctgggctgggtgcggtgactaatgcctataatcccagcactatggaaggctgaggcaggcggatcacttgaggtcaagagttcgagaccagcctggccaatatggtaaaaccctgtctctattaaaaatacaaaaattatggccgggcgcagtggctcatgcttgtaatcccagcactttgggaggccgaggcgggcagatcacaaggtcaggagattgagaccgtcctggctaacacagtgaaaccccatctctactagaaatacaaaaaattagccgggcgtggtggcacatgcctataatcccagctatttgggaggctgagtcaggagaattgcttgaacccgggagacggaggttgcagtaagccaagatcgtgccactgcactccagcctgggcgacagagcaagacttcgtctcaaaaaaaaaaaaaaaaattagccaggtgggtgcctgtaatcccagctactcagcagactgaggcaggagaattgcttgaaccgggagacggaggttgcagtgagtcgaggtcacacctctgcactccatccagcctgggcaacagaacgagattctatgtcaaaaaaaaaaaaaaaaagctacattgagccaggcacagtggcccatgcctataatctcaacactttatcagtctaaggcaggagaatcccttcagtccaggaattcgagaccagcttggacaacatagtgagacccccatgactacaaaaaaattaaaaaatcagccagacatggtggcctacacctgtggtcccagctacttgcagccgtgcacggcaaggctgcagtgtgccatgtttgcaccactgcacttcagcctgggcaacagagcaagaccgttgctcaaaatttaaaaagacaaaaaaaaaaaaaaaagctatctagatttagcttttatatttaggtctatgagacattggaaataaatttttttttgagacagagtctcactcttacacccaggctggagtgcagtggcacgatcttggctcactgctacctctactccccaggttcaagtgattctcgtgcctcagcctcctgagtaactgggactacaggtgcacaccactatgcttggctaatttttgtatttttagtagagacggggtttcatcatgttggccaggctggtctcttaactcctgacctcaagtgatctgcctgcctcagcctcccaaagtgctgggattacaggcatgagccactgcgcccattcctgttgttttgttttttgagacggtcttgctctgtcacctaggctagaatgcagtggcakggatgactcactgcagcctcaacctcccaggctcaagtgatcctcccacctcaacctcccaagaagctggaactataagcaagcaccaccacacctggctaattttttaattttttatagaaatggggtctcactatgtttcccaggctgctcttgaactcctgaactcaagtgatccccctgccttggcctcccaaagtgctggaattacagacatgagccagtgtgcctggtcttcaaattaattttgtatatggtgtaatataagaactaaaacttttttccccccatatggatatcaagttatatcagcactatttattgaaaaggcatttcttgcctctgctggattgctttggtactttttttcaaatatcagatgagcatataagcaggggtgtcatgctttctgttctttttgttcgttttatttaaaaattcttacgacaaacgctagaatccttatgggagtaagtttaatttacgtatcagttttgagaraattgacatcttaacaacatttttctagtttatgaacatagtatagctagccttttacctaggtcttttatacttttcactgtacaggtcttatacattgtctgttaagtttattcctaaatacattttattttttatgccattataaatggaattgtttctaaattgtatttaccagtcttttgctgctagaatatgaaaatacaattgacttttgtatattgatgtatccttcaatcctaaagacatttttattagaatttaatctagtagttatttgcgcattatttgggattttttgtgttaaacaatcatgtcatctgcaaacagaggcagttcttttccatttttatgctttcagcgttttttttcttgccttaatacagtgtctgagatctccactagtgagttgaaaggaaatggtgagagcaggcatccttgctaggaccacgtatatctgtggtcccagctacttgggaggctgaggtgaaaggatcacttgagcccaggaggtcaaggctgcagtgagccatgttcacgctactrcactacacactgggcgacagagagagaccctgtctcaaaaaaaaaaaaaaatttaaaagccatactggtgactgtctaraagtatttcattgtgatttttgttttgttttgctttctttttttgttgttgttctcattgtgattttaatttgcatttccctgatgagtaatgatattgagtgccttttcttctgctattggccatttgaataccctcttctggggagtgcctgttcctgatttttacccatgtttttcttggattctttgtcttttttcttactgatttatagggtgttttttttttccagtattctgaatataagtcctatgttggatagaagtattgaaaatatcttctcgcagtctgtggttcatcttttcagggtttttatttttttgaggcagagtctcgctctgccgcccaggctggagtgcagtggcgcaatctcagctcactgcaacctctacctcctgggttcaagtgattctcctgcctcagcctcctgagtaactgggattacacatgtacccgccaccacacccagctaatttttgtatttttagtagagacggggtttcaccatgttggccaggctggtctcaaactcctgacctcaaggaactcctgacctcaaactcctgaccccacccacctcagcctcccaaagtgctgggattacaggcgtgagccaccatgcccagccatcttttcagtattaatggtatctttttatgaacacaaatcttagttaaaataattttttcttggtcaggtacagtggctcatgcctgtaatctcaacactttggaaggccgaggcgggaggatcccttgaggccaggagttcagtaccagcctgggcaacatagcaagaccctgcctgtacaaaaaaaataaaaaataaaaaatagctgggcagggtggctcatacccatatgtaccaactactcaagaggctgaagtgggaagactgcttgggccgaggcagttgagggtgcagtgagccaagatcatgccactgyactctagcctgggcaacacagcgagatcctgtctcaaaaataaataaatgaaataataaatagatatatttttattaaaagttagtgagtgctttttgtgtcttatttaagaaatgtggccaggcacagtgactcacacctgtaattcttgcactttggggggccagggtgggaggactgcttccatccatgagttcaagaccaacctggccaatatagcaagaccctgtctctaaaattaaataaataattaccctggyatggtggtacacgcttagctactgaagcaggaggattgcttggacccgggagttcgaggctacagtaaactatgatcatgccactgtactccagcctaggggacagagcraaaacctgacytcccacctcccccgcaaaaaagagaaatgtttgcctattccaagtgcaacatattggaaggaagatattcttctgtattttgatcttgaaactatattattttaccattcacacttgggtctgtggttcattttattgaaagatcagttttccccactgaactgcaatgatgccatgtcataagtcagatgattatatatgtttgggtctatttctatactgtatcttcttccccaaaggtctatttatctctgcttgtgccattactattaaatttttaaatattagtttgaaagtttccgaagtttgtgcctgttttcacattgactcttctagaaagaggtttaccaattccttagattggtatcctgttgaactgcaatacttttttatatgttaggtgatttttttttcatccttactagggccagtctatacttgttcatattgagagtttagatgggcctcttaagattttcaggtgcagacaaagggaaaagaggaacatttgatttatactgccagtgttaaacactctgtttgctagagtagactaggtttctcaacctaatgttattctgggttttttgcctttattagaacccatcctcctcagctgtgtcttccttctgcctcatctggccacccacaccagctatcagttagcagccacaaatacctgctgtgtttcccatcaaccctggtaggatccagttgtgcccttctttttttttaattattttattttattttattttatttyatttyatttcatttatttyatttywtttattttattttattttattttattttattttattttattttattttatttttgcccaggctggagtgcagtggcacgatttcgactccacaacctccgcctcctggattgaagagattcttgtgcctcagcctcctgagtagctgggattacaggcgcctgccaccacgcccaactgatttttgtatttttagtagagatggggtttcaccatgttggccaggatggtctcaaactcctgagctcaggtgatccacccgccttggccccccaaagtgctgggattacaggtgtgagccaccgcgcctggcccctgtgcccttccaactgcatcacaacccaccttggttcttgtcttagttgccccaagataagggtattaatgtggtactgccgctaaggtctcatctgtattcttactcagcctgaaaagggttgaacatcagttgtcctttttctcactccasttccacccactgttagacttgcagacagtttcccaaagtttctggtatggggttgcctagtactgatggatgctttcttcatttttatttatttatttatttttagtcatttcaatgggaaactggaaggatagaagagaagcatatgcttaatgtcattctgattaaacaaatcaatgttagttttgttttcattttggggagtattttttgttttgttttggsatggagtcccactctgtcacccaggctggagtgcaatggcgcaatctaggctcactgcaacctctgcctcctgggttcaagctatcctcctgcctcagcctcccaagtagctgggattacaggcatgcgccaccgtgcccagctaatttttgtatttttttagtagagacggggtttcgccatgttggccaggctggtcttgaactcctgacctcaggtgatccgcctgcctcggcctcccaaactgctgagattacaggcgtgagccaccgtgcctggcctcaatgctagtttttaagaaatgagtttctagccttccagattgaaatacttggaaggtcattgttcatttgataaaggtaggcattggacttagattgtgctttcatgggtttatatgcatgggtttgttacttcataactagttccaccactctcgtgtgacactcaggaggagataatttagtgatttcatgaagatkctccttaagtctttctgtgttgggtctcaaccctgtaggctggatattartagggaccataccccaaaggtccaggaaaggaaaggtgaaaataataagatctccagaatggagtaggagtgatggttttgaggccatgggttttagatgatctagctgtttgctttcatttgataagaatgccatatagctcacttggcagctgtgtaagagaaagcagtcctgataacccagagacccatttaagaattgtgtgctctcgtggagccagcaccctttcccaagccggctttgttcaagacccagctggagagcagggatgtgtgctgtattctttgtaaccctagtgcatgttataatgttcaggaattggtaagcaaatgagtattcatttagaaattgggccttaggcccagcatagtggctcatgcctgttacccaagcacgctgtgaggccgaggcgggtggatcacttgagcccaggagttcgagtccaatctgggcaaataggccctatctctacaaaaaataaaaaaaaaaattggccaggcatggtggcacacgcctgcaatgctagctgttcactaatcaggaggctgaagtcgcggggaggatcactggagcctgggaggctgggagatggaggctgcagtaagccttgatcatgccactgcactccagcctgggtgacagagcaagactctgtctcttaaaaaagaaaataaaaggctgggaacagtggctcacacctgtaatcccagcactttgggaagctgaggccagtagatcacttgagctcaggaggtcaagaccagcctggttaacatggtgaaaccccatctctaccaaaaatacaaaaattagtcaggcatggtgacgcatgtctgtggtcccagctactcaggaggctgaggcagggggattgcttgagcctgggaggcagaggttgcagtgagctgtgattgcgccactgcactctagcctgggtggcggagtgagagtctgtctcaaaaaaaaaaaaaaaaaaaagtttggagctcattacacctggcttttattgtttgctgttttgctttttaatatagctaaagtatgcagatttatttagctttaagttttgttctcaattccctagtggaaaaaaaaaagcaccaaaaaaattcaatttttacatttcaattcaaatgcaagaacttggaacagaccattgccttttatttatttatttatttatttatttatttatttatttatttattttttattttattttttttgagacagagtcttgctcagtcacccaggctggagtgcagtggcacgatctcggctcactgcaacctccgcctcccgggttcatgccattctcctgcctcagcctcccgagtagctgggactccagacgcccgccacgacgcctggctaattttttttttgtatttttagtagagacggggtttcaccatrttagccatgatggtctcgatctcctgacctcgtgatccacccgcctcagcctcccaaagtgctgggattacaggcgtgagccaccgcgcccggccgacttttttttttttaagagggaagcggtaataggaaatttaatcaggaagatttctaagcttcaattgtaaagatacctccttttcccaagagttaggcctaatgaagactatacctaccagtacggagggggaggggataaatcacaactaaagaccttggcacttctgtaagaaatttaaataacaggcagacatatagagatttgtaaatatgtacttgctgccagataaaccacagggaagatactgtatttgtggtccagggaagtttaaatatttgtggtcaaacttaaaattcaacgtaaaactctcatctgtgatggaaactttccagaaactgcatggagcgggtgtgcaagctgcataaactctcaaaggcctctcctctcaccaggctgagctggaaaagcctgttctccttccttcaaactgtgtagctaacaagcccttcgatcagagaaggaactccttgatgctccagccaccacccaagaaacccgctctaaggacctttcgggccaggcacagtrgctcatgcctgtaatcccagcactttaagaggccaaggccggaggatcccttgaacctaggagttcaaggccagtctgggcaatatagggagaccccgtttctataaaaaattagccaggcgtggtggcaggcgyctgtggtcccagctacttgggaggctgaggtagaaggatcgcttgagcccaggaggtcgaggctgcagtgagctatgatcacaccactgtactgcagcctgggcaacagcgagatcctgtgatctcagaggacctctttgagcgagataagaaaggacctctcttttttgtggcttgcaccttcaagtctgatcaaatattacctttcttagggtcttctattcaccatcttatataaaatagcaatactcttccccaccctgccgctctctgtctcccttacccaactttttttcacagtacttcccactactgtctgcttatttgattctcagtctcagaaaaatgttttaagttccatgggaacaggagcattgttttattcactgctgtattcctggtggtttgaatagggcctgccacaccatagcatgtgcttaataaatatttattgaatttcagtagaatacatttagaactcagactgtgagatcagcctgaaacacctcagatatcttactttgtgttctgtgaggctctacgagctcctctgataaggaaactggcactgaaggtgggcgtagcggccttcagatgtaccaggcagctcttgccgtaacacctatagcctacacatcgaaatggaattggagccgcttaattttcacagtaaatacatatatagcactctttgtttctggccttcaaatttgttgatgaccctcctgatattgattcctctggggtgggagctctttctgggcagcgtgcagactggagcacatgtatatactttgcacattattttgcccaactttttgtcatttgagaccctgcttggctggggagactgttgttgctgacctctcccaggcctgttggacttgatgatgactgatggacttgagcacctcatcagggtctttcttccgtctgctttcctttgctgcttccgccagatctttccatcagtccccccaacacagagtgctttattgttgatgatccttagtatttggcatgaaatgtgcttcacaaatgatgttgattatctttaaaataccgtgtgtgtgcgtgtgcgtgtgtcatagtatatcaccacttacataaatgtatctataaaaggcatagagagagctcgtagttaatcacatatgtcagtaaatgcagaactatctctgaagaacataccagaaactcgcaacagggcctaaaaatcaaaggtgggaaggttttgtttttaaaattcggcctttgtattgctttttttcaccatgtgccatgtttctgaactccacgttactaagcagctttggcttcagtttggcctggtacttgattctgagatgccaccatatctcattgaactcctttggtactttgtcagcagcaagagtgactttagcttaagtaacagaattaagtgacagcttttagttctgtgttgtcttttttttttttttttttttttttgagatggaatctcactctgtcgcccatactggaatgcagtagtgcaatctctgctcactgcaacctctgcctccgggttcaagcaattctcatgcctcagcctcccaagtagttgggactgcagacgtgcaccaccacgcctggctaatttttgtatttttagtagaaacagagttttgccatgttggtcttgaactcctgagctcaggtgatccacccaccttggcctcccaaagtgctgcgactacaggtgtgagccactgcgtctgcccttgtgttgtcaatttttttaaagtttagggtgtatataggtttctctagtataggctggtccagaaattttgtctctgttttgtcagtataaagcactgaaactatacttcaaagtagtttataatggtttgcgtgtctatatgtgttcttcaaaagtagagtaagcagcacgtagttattggattcctgtctctaatcctattcttaatctactgccttgaaaatatttaataaagaatgagaaaggccatgcacggtggctcacacctgtaatcccagcactttgagaggctgaggcaggcggatcacttgaggccagcaattcaagaccaggctggccaacatggcgaaaccctgtctctactaaaaatacaaaaattaaccaggcgtggtggcacgcgcctataatcacagctacttacgaggctgaggcacgagaatcacttgaacccaggaggtggaggttggagtgagccaagattgtgccaccgcactccagcctgggtgacaaagcaagtctccatctcaaaaaaaaaaagagagacatatattctaacagcagctttttggtctctttttcaaatcctgtgagaatatactacatagacttggtaatcaggaatggatcagatgagatactgtcaactctaatgctattttgccaggacaacctgcagaaaaatacatcttcctgttctagatagatgtcatagcctttattatgctctgtgctagtcatgagaaaacgccagataattaatgtattgtctctggggttgagtttactctctgaaaaatggggatgacattagttatttcataagattttagtaaggattaaatgagataaaataagtgaaaatgcctaggtttttttgctctgtcgcccaggctggagtgcagtggtgtaatcctcaactcactgcaacctccaactcctggattcaagtgattctaccacctcagcctcccgagtagctgcgattacaggcgcccgccaccatgcgcgactaatttttttatatttttagcagagacgggtcttcgctgtattggccaggctgttctcaaactcctaaccctcaggtgatccacccaccttggcctcccaaagttctggaattaaagggatgagccaccacacctggctcagaatttttttattattattattatctgagacagagtctcgctttgtggcccaggctggagtgcagtgacacaatctcggctcactacaacctctgcctcccagattcaagcaattcttctgcctcagcctcctgggtagctgggactgcaggtgtgcacctgcaggtttgcaggcgtgggcctggttaatttttgtatttttagtagagacagggtttcactatgttggccaggctggtctcgaacacctgacctcaagttacccgcccgcctcggcctttcaaaggcctgggattacaggcgtgagtcactgcgcctggcaagatttttaaaaatgaaagtttcaatatgtgttttcatagtggacgctggggattggagagtggctaagaagactccaaagaggtccagttacaactcagtcacacatcagattcccatgtctccttctggatcatcctgtagtttctatagctgttttctgtaattcatgcaaattctctgtaatccttcatttccgttttctacccacttagctgttgccattattttgaggcattggatgtaaaaaacaaaacaaaacaaaaaaaaacctgttagatttatcttgtaggctaaggctcagaaattgggcaaggttcaggtagcttttcagaaggcgaggcaggtgtgcttagttacactattccaagattctcccagaaatagaactctaaagtgaggacttgggtgcccttgaaggagaacaacaaaataccattttggaaataaaattctgctgtcctgggtgttccagcccctcccatgctggcctcctttcggcaccattcctttctgcagtcccaccccgcttggccctggcacgcagtcccatgaacatgccacctgccttctctctctctctggccccatccattggctgttcagtttattttttccacatcctcaccctcttccagctccaagttaaataaccctcacagatggcttgttccatcagagctgtttaagaacacagagcagtgaactagtgcccagaggagctgccccagcccaagactgcccttcctatggaggctcaagacaactgtgtcatcagctacctagaggcccagagacagtgagcagaaaggctggcaggttgggtggtagaatgtctgtttaacactataatcctctagcagctaacaactagttctcacttagatttacaagtcagaaccaggagccagatacactgcatactccattttccatagaagacatagtacttcgtagctggcatttctcccccacttttttacagcatggaaacccaacaggaaatgacagtccccatttgtgtttgggatcatggtttcagtccttagtgaacctcttcatgaactcccgagaggtctagatccctgccctgcctgacccaaagggcaggatttccagctgtcagcacacccatgggaagacagggaacttcacatgcctattaggaatcctgcatagagtctgggcacagtggctcacacctataatcccagcactttgggaggccaaggtgggcagatcacctgaggtcaggagttcaagactagcatgaccaacatgtcaggctaaaatactaaactactaagtactraaatactaaacgtctctactaaaaatacaaaactcagccaggcgtggtggcacatgcctgtaatcccagctacttgggagactgaggcaggagaattgctagaacccgggaggcggaggttgcagtgagccgagatcgcacaattgcattccagcctgggcgacaaaccgagactctgtctcaaaaaaaaaaaaaaaattcctgcctagagagaagatcccagaatttctttcactctttctttcctgtcagcagggacacggaggtttcctgtctgccttgtcatcagctttgaaacattttcctcctgcattcccccatatatgtagtggcctgtaagctttgcccccttcatgttcccagcatcctccttccctctctcataatcggctgggtctggttaattttgcccttgtgacaggacagcctttcccttgtcctcggagttattcctgtgggacataagacctctctggtcatggtctccctctctttcccttccttcttgccctttcctctctaactatagcctttgtaaatagactcctctgaggtcaccgaggaatggtagtatgtgcctttgctgctataggactctcttttcccccagtaagcagagttcccttgagagacccccctcccttcctttattaaaaggcacgttggtggcttatctgcttgaactctggcataacagggcatggaacaatggcatgtgcagagtgctttggccaaagggaaattaactttgagccagagacagcagtttgaagaaacttcccttagtaagaaaagagacaagaagaaaagtgatggggtggaaagggaaaattctatggcagagaaggtctccctgagaactcaatcagaaatcagtatctcctccttaagcctggtttttccactgagaagtaaactattattctctcttctcctccttcataccttctccaagatcaagcgttgccagataagtaacacaccctgttgcttgcaaagtaaaagttacttggattgacagatttgtggagcctttgggtgccaagtatcaggagggagctttgatttccattttcctgtcttcatgatggactttactctttacattcagtagaaaagttcaaggctgtggtgcagacaactttcagaggttacccacatataggtcttaaaacttaacatctggcagttactagtttcctatattcattcagctcatcaagtattcagctgaggttttgcccatattatgtccagtgaaatgaaatgaatctaagtgatagaactctttttagggcaggtatcctgagaaattttaaatttcagtatttcttttcttgcctgtagcttagccaagcacccattcaatttgtgttcctytaaaggcaaattcgtcagaactgtttcttctgtyctgagggcctttaggctactgctgagtctgggcaagtgttatttatttatttatttatttatttttgagacagagttttgctcttgttgctcaggctggagtgcagtggcgcggtcttggctcactgcactctccgcctcccaagttcaagcaattctgccttagcctcccaggtagctgggattacaggcacctgccaccacgcccggctaatttttgtatttttagtagagattgggtttcmccatgttggccaggctggtctcaaactcctgacctcaggtgatccacccaccttggcctcccaaagtgctgggattacaggtgtgagccaccacgcccggctgagtgtaatattttttaagtgagaaagacttgaagtaggctgagtgcagtggctcacgcctgtaatcccagcactttgggaggtcgaggcgggaggattgcttgagtccaggagtttgagagcagcctgggtaacatggtgagaccccatctctacaaaaaaaaaaaaaaaaaaaaaaaattagctgggtgtggtggtgcatacctgtagtcctagatgttcaggaggctgaagtgggaggatcacttgaacctgggaggttgaggctgcagtgagccawgatcacaccattgcactcagcctgggcaacagagtgtgaccttgtctcccaaaaaaaaagatgacttgaagtagagacctttccctatactctttgtgaaagtgccattaccttcataagaggccatattataatataatgaactgagcacaaactttggagtaagacaaatctgggttcaaagcccagcttcatcacttcatcacttgctttttctgagctttagtttcctcttcctgtctcacaggattaccatgataatcaaatgaaataacataattcctagtaaccatctgtcaccacttcatctacaccacagctttcccagtaaaatgggatatttaggccaccaagaaagcgtgatcaatgaaaattgcagaggaagtaagatgctaacttgctctacctgccactaccctgaacctttttttttttcaacccccttaacctcyttaaagagcttctggcatgctcatgggtttttctttctagaactttccctgccctgaatttgttcagtatgcattgtcacttgtgaggacttcttttcacaataaatacccaagtgctttagaatgtctggatggtggccaggcacagtggctcaagcttgtaatcccagcaatttgggaagctgaggcagacggaacccttgaaatcaggaattcgtgacctgcctggccaacatggtgaaaccctgtctgtactaaaaatacaaaaattagccaggtgtggccgggcgcggtggctcacgcctgtaatcccagcactttgggaggccgaggtgggcggatcacraggtcaggagatcaagaccatcctggctaacatggtgaaaccccgtctctactaaaaatacaaaaaattagccgggcgaggtggtgggcgcctgtagtcccagctactcgggaggctgaggcaggagaatgacttgaacctgggaagcagaggttgcagtgagctgagatcgtgccattacactcctgcctgggctacagaacaagattccaactgaaaaaaaaaaaaaaagaatgtgttgatggtgattctcctggaagtcaagcctgctttctctgtgccatcacagaggtgttgctggcagactaatcttgagacgacttcttacctctttgcaccaaggctcttattaaggggtctttcctgactttagatccggtgatgagttagcccaaaagagtgtgctcagtctcctatagggctcacaggtttggcttataccctccaagtggcccaatgggagctacagggtgttggaggtggtcatgggaaagaaacagctcacaagaagagcgtggggcgagagccagccgttccccactgcctgctggagcaagctcagtgaggccgctgacaagagtcctcagaacactaaacaggtgattaaaacatcagtataagtctttccaagcttcacagaaagccaaaaacttagtttggacagcaacagaaattttccgctctgtagctttataaactggtccgctgtttcttcctctgctctgtggccagaggggagctctgtgctaatgattccataaaaccctccaagtcttcctgagtggcttatcatatgagagtaacctataccacccttttccatcagagtaatctctagcctctcactgttagttcgcattctgaatctttaacccttccaaaaaggccaagcccagctcttggcactgtcccctatgacagagctgagctcctccatcaagctcagtggcagaacgatcctttcctcctttccaagatgactgcccagaatcacagaaacctgtaagaatggaaagagagtaatcccaattctgggcattcacccaaaagatttgaaatcagttggttgaagagatgtctggactcccaggttcactgcagcattagtcacaataaccaagttatggaattagtctgagtgtccatcaacagatgaatggataaagaaaaggtgggacatacacacaatggagtactatttggcctttaaaaagaaattctgttgttttcagcaacatgggtggaattgaagagcattatgctgagtgaaataagccaggcacggaaagacacataccatatgttctcacttacatgtagaatctgaaagagtccagctcataaaagcagagagtaggatggtggctacagaggctgggaaatggggagatgatggtcaaagggttcaaagcgtcagttccatgggagaaagatgggtgtgtgtttttctgagatctgttgaacagcatggtgagcataaaaatacagcactgtacatttaaaattgctttaagaggtcagacgtggtcactcacaactgtaatcccaacattttgcgaggctgaggcaggatgatcacttgacaccaggagctcaaaccagcctgggcaacatagtgagacctcatctctwaaaaaaaaaaaaaaaaaaaaaaaaatgaaattagcaggatgtggtggtccacgcctgtagtcccagctacttgggaggctgaggcgggaagatcacttgagcctgggaagtgaagactgcagtgagtcttgatcacaccactgcactccagcctgggtgacagagcaagaccctgtctaaaagaaaaaaaaattcctttaagagtaaatttcaaattttctcaccacaataaaatgataagtatttgaggtgatgggtatgttaattagctgggtttaattattatacattgtattcataaaatatatcactttgtacccttgtaaataaacacaaatataaattgtcaatttataataaaattttgtaaaggactaggaatatagatcttcagagttattagcatcttgcagacagggctcagtaatttgcctgagagcacacaagttaggaggccacgacactgtcgttccactaggccctgcttgtcctagactgtggcgtgtcacccacccaggaggagtgcaccatgcccagaagagttcagtcttcaagaaatcagctctgagaggctgcctttttctcttcttctgtgaatttccaggcaagagaagagctttctccttggggagatggtgagggtctctgaaacacctgtgaatgttctggatcatggagagctgtggcagttagaacagtccggcccctgcagttactggctgcatttcctgagcaagttacttctctgtgccttaatttcctcacctctataatcgaagcagtgacagtatctacttcatgaggttgtggggatcacgagttggttcgtgtaaagcatttggcacagtgcctggcttgtagtaaccattcgctcggtgttcgctgtggctgcgaagggtgagtgaggcatgcagcaggttttattacgtcccggaaggccgatggcactcttccaggaaggtagcgctggtgagctggtaaaccttgaatgaggaagtcattttatctggctttggatcttagttctcctgagaatgtcattgaatttatttgaattttagtttcctcatctacatcatctggatgtagtaactgcatcaaagagtgcagaggatttctagatcctaaaagtatcatgaaaaatataaagtaggttgggtgcagtggctcacggctgtaaccccaacactttgggaggccaaagcagaaggactgcttgagaccaggagttcaagaccagtcctggcagcatagcgaggccccatctctacaaaaataaaaattcaaaaattagctgggcatggtgatgcatgactgtcgtcccagccacttgggaggctgaggcaggaggattacttgagtccaggagttcaaggttgcagtgagctttgatcacgccactgtactccagcctgggtgacagagcaagaccctgtctcaaaaaatatatagatagtagtagtgtttgcayctttgaaaaatagagttgcattttgaagagtctagtaaaattgtgaccactttgacctaaccttccatcctttaaagcagtaattctaaaactcagtgttcataagtacctggaacacttacacacattctggccaggtgctgtggcccacacctgtaatcccagcactttgggaggctgaagcagggggatctcttgagcctaggagttcaagaccagcctgtgcaatacattctggccaggtgctgtggctcacacctgtaatcctagcactttgggaagctgaagcagggggatctcttgagcctgggagttcaagaccagcctgttcaatatcgcgagaccccatctctacaaaacattttttaaaaattagctggatgtgatggtgtgcgcctgtattcccagctactcgataggttgagactgcagtgagccgtgtttacaccacagcactccagcctaggtgagagagcaaaaccctgtctcatagaataaaatgtttaaaagtacacattctaaggtcctatctcaagaaatactaattcattgaattcaaagtggaatccatagccaaggagtagtgttaggtaaaaagaaaacaaacaaagtcgggcaccagtggcttatgcctataatcccagcactttggtaggtgaaggagggcagatcacttgaggccaggagttcaagcccagactggccaatgtggtgaaaacccatctctaaaaaaaatacaaagattaggccagggacggtggctcactcctgtacttgaacactttggaaggccgaggcgggcgagtcatttgaggccaggagtttgagactagcctggccaacatggcaaaacctcatctctacaaaaaatacaaaaactagctgggtatggtggcacttgcctgtaatccctgttgcccaggaggctgaggcagaagaattgcttagatctgggaggtggagatttcagtgagccaagattgtgccactgcacgccagcctgggcaacaaagcaagacactgtctcgaaaaaaaaaaaaaaaaagataaaaattacctgggcatggtggcaggcacctgtagtcccagctactcaggaggctgagatggaaggatcacttgagcccagaaggcagaggttgcagtgagcggaaatctcaccactgcactccagcctgggcgacagagtgagacccagtctccagaaaaaaagtggagttcgggaatctgcatttttaataagctcagcgtgtgattgtgatacagttggttttgaaaaaatgccttttcatgttcagatgtgaagaagggagaactgacactgattgagctggttctgtatggcagccatttgctgacttacacgttatcccgagctatggataggctagttcgttttcgttaacaaagcttctcttgtctccaactatgaggcatgggtcatgtttgtgattcaggactccagaaacatagaacctgaaaatgcaacttaaaatggctttctacctcagcccaaatctcagagaatgtctgcatactacattttttaatatgctgtgggggttcttcagatgtggatgtaatttttttttttcaaagcatgacatcagtgctttgaagatcattaaatgtcacttcttaggaggtacattttaccttgacctggtacaacagcctccatggagttaagacctgcccagagcgtggcttcttctggtatctggtttcacatgagaaactggaggcagcctgtcaaagaggagtccctattccttattgagtccaaacccccatgaggagcaccccccaaacagaaggtagcatctccgagtgtgtccaggtgtctgtgttgcacagcttcggggagcatgattgacacagtataggcagtatggccgcaccacctccgtgatgtcctctgggattgtcctgaggctgccatctgacccccacgatcactcatccacattgttcaggtatccatagtgcatgttaaatactgcagatagattttattttaagcacacacacaaacacacacactagtgcctcccctcaagaatcttacttaggagaaaaaaacacgacagattaatgggagaaagatattaagaattgtaaataaaaccaactgataaaattcatgtaacatggccaggcacggtggctcacgcctgtaattccagccctttgggaggctgaggcgggtggatcacctgaggtcaggagtttgagaccagcctgaccaacatggggaagctccgtctctattaaaaatacaaaaattagttggacatggtggcgggtgcctgtaatcccagctactcgggaggctgaggcaggagaatcacttgaacacaggaggcagaggtttcagtgagccgagatcacgccattgcactccagcctgggcaacaagaccgagactgtctcaacaacaacaacaacaaaaagtatgtaacataaacctgagaagggaatgcattcttagatgaaaaatttaggatccaaagagaacttaataggttgcaatggggagaagtaaatgacargatgaaatcagaaaagaaagaatgtaaaaccctaccctggtccaaaaagtcagccacacttagcatgtagcatgcagcacaatggtaaataatcggatttcttcaggcatggggagaagaccttggtgaaggaaaagatgtgaaagggaatagttggtggagggcttgtactccataaagggagataggatttagcaacatatgtgaaaacaatttggggwtttgttgattagaagctcacaattggcagggcacagtggctcacacctgtagtccgaacactttggggggctgaggcaggaggattccttaaacttgaactggagttcaagaccaactggggcaatatggtgaaaccccgtctctacagaacacacagccaggtgtggtggcacgtgcttgtagtcccagctcctgaggaagttgaggcggaaggatcacctgagtctgagaagtcaaggctgcagtgaaccatgatctcgtcactgtactccagcctgagggacagagcaagaccctgtccccygccccccaagaaaaggaaaaaagaagctcacagtttatcagtagtgcaaggtggggacaacaacagtaatgctgttaagtctattattaaaattgagtatccccgatagaaatgggagggaatggtctactctctgctctgctaccaggtcacgtgggcactcactgtgggagacactttagtcttagtgaaagtcttagtgaaagaataagcaggatgtttaggagacagttggagtgaggcacagttgaaggaagtgggactgtttagcctagagaaggtgtataacacagcagacctcataatttgaggccagtcagataaaagcagaatttgagtttgttttcttttgttttttgtttttttacatggccccagagaaccgaattagaagcattgggaggcagatctgggtttaaaaggtgtaaacatttctagcaattagaaaagtccaaaaatagaatggccttctggtaggaaatatgcccccttacagattcaacacagtaacacacctcatacagaatggtcaggaaaaaagtctgttagtgtagacaataaaaatgattggctggacgtggtgactcatgcctatcatcccagcactttgggaggcggaggcaagcagattgcttgaggccaagagttcaagaccagccatgccaacatggtgaaaccctgaaattagcaggtgtggtggctcgcacctgtggtcccagctatctgggaggctgaggtgggaggatcacctaagcccaggaagtcgaggctgtagtgagccgtgattgtgccactgcacaccagcctgggtggacagagagagaccctgtctaaaaaaaaaaaagaaaagaaaagaaaaattatatatttcttcaatgttaagtaatgattgattttaaaaactactccagggccttgagtcctctccaccagaagtagtcaagaaagacttggatcactgaggggtatttagaggaggttctcttgtggctctgagtgattgttaaggtctcttccaaccaaaggacaaaagaattcactttgtgacgtacaagtagtgcagatgttgagggctgctaatggagtcagagaagatgaatgaagtgtaggcctagtccatagttgctggagggatacctgtgtacttgggagaggttagtgtgaggttcctgtggagtcctttgctggactgaaggtcatgtgaagtcaaggactgcatctgtcttgtcttgtcttgtcttgtcttgtgtgcccaggatgtctagcagtccctgtcacatagtagggcgttacgaaagatttgtggaaggtaggctggcagactggacaaaggctaactggcgtcttgaaggacttataggctgggatgggcggctcacacctgcaactccagcactttgggaggccaatacaggaggatcacttaaagctatgagtttgagatcagctaggggacatagtaagaccttgtctctacaaaaaaaaaattagccattagccaggcgcagtggctcacgcctgtaatcccagcactttgggaggccaaggcaggtggatcacctgaggtcaggagttcgaggccatcctggccaacatggtgaaaccacatctctattaaaaatatgaaaattagccgggcatggtggcgtgcacctgtgaatcccagctactcaggaggctgaggcacgagaatcacttgaacccaggttcaagacgaaggttgcagtgagccgagatcgcgccactgcactccagcctgggcgatacagtgagactctgtctcaataaataattatttgccagacataagtggtgtgcctctgtggtcccagctactctggaggctgaggtgggaggattgcttgagcccagttatttgaggcagcagtgagccttgattgctaacagagcaagactctgtttcaaaaaaaagagaaaaaagaaaaagaccttaccaagcttaaaagacgatgagggaatgaattgattgcttaaatgtaaaataactgcaggttgggggagtaatatgtgaactttcagaggtgccaggggaagcagacagcctgcagggtatagcaaagggggttgcctggggcttgaagttccggattagggaataatagccacaagtgccagtagtgatctttggggggaggggtgggtgggcgagggtttgcaaggagcttgggatttcatttgatagcaaggctaagcccaaaagaattttccatcccgacttcctcgggacccatccgcctgaaaggaatgaaggagcagtgtcctgggtctctgcaaggagcttttcttctcccttgggctgagaattctgccttcctgagtaccgcaggtcatggcagccggggaggggcgcgtgctctcttgatgcagggggtctgttgatgtatctggtatgaatgtgacccacgccacccaaccccccaagtgaaacagggattttcctttgttctgtgatgagtccccagggtctggaggacagtgcctcacacacacagtaggcacttacatgttgctgaactgcatgttgcctaagtgtgttgaagactacagatgtctccgagagtccactcttgtgccacgcgtagaataaatacaattaggagcaaatttggtaaaggagcctaaacacaaacctaaggggaggcctcctggacgtggctgtctagaaggcaaacagtgtggttcagagtgactagagcccaaggttcagtgcttctggcccagagctaactggcagtgtagaaacagactgtgtgtggatatttgcagactgagacagacgggaggactttcatccccaggggctgagcctgcagcctcccctgctggttcagtaagtgagggccccagcgcctgtgttccaggtttcagatcagctgaagccagccagacctgaaaggcttgtgttggcagtgccaatatccgtccttaacccctgccaatgtgggtggctgctctaagagcactctgcaggggaagcagaattggactgaagcccgagctactgctgcctatagcttgctctctgtgacgcttttgccgctgagaatgtacctttctggtacagccggagccgagagctctagaaaagaatagtttctgtccatgaaggaacagttcaagaagagcaagcttactctgcccatggaagaccagactcctatctggctttgtttggaacatctaagctcaggaaattcaggtgggtagaaaataccatattggggatcttctcatcactactttcatattgggagacatgaggcaaggatccagctgggtcttatttaagaaagataccaggctggacacggtggctaacacctataatcccagcactttgggaggctaaggcagtgggattccttgaggccaggagttcggagtagccaagagcagcccgggcaacaaagcaagaccccatcttagaataaaataagatactgttggccaagcaaagtggctcacgcctgtaatcccagcactttgggaggccgagacaggtggatcacttgaggtaaggaattagagaccagcctggccaatatggtgaaaccccatccctactaaatatacaaaacttagctgggtgtggtggcacgtgcctgtagccccagctacttaggaagaatctcttgaacccaagaggtggaggttgcagtgagctgatatctcgccactgcaccgcagcctggggtgacagagccagactccatctcagaaaaaaagaaagaaagttacgttgcagggtttgcagggcctcctcaaaccctcaacgatcccactagcaaaggcagagccaccgcccgtaccccactgtgaagggacctcatggasaaggcaattgtgactgtatttctgatacatttattagtggcccgcttgttccgaagcccgggaccttggagcctctctagattactggagtaatgcatgcatacctatggttaggtccggagtctttctgaagaatagggagagggattgctgaagagaggcaaggtctttcctcccctgcttggccagcccagtagcctggatctagcaccttagttctgaataaaatatttcaggccctgagtggtggctcgtgcctgtaatcccagtgctttgggaggccaaggtgggaggatcacttgaggccaggagtttgagaccaacaatatagcaagacctcatctttacaaaacaatttttaaaaattagccagcttcccgcttgagctcaagagactgagcctgctgcaagccatgatgacgccactgcaaactccagcctggacaaatttaaaaaaaattttttttgcagcttcaacagccaggtaagcattccagggcctctccccttggccctaggctatgtgccagccccatgcttcccaccttgcctctcagactggcttccaaacagctcagccatgttaggcagtgcccctcccacctctgaagagagtggagataagaggaaaaaaaaatgccagctgctcaattatcgagcacctactgggcccaggcatctcgctaagtatttgatatgtattccctctgtctttttttttctttttgagtcacgatatcactctgtcaccctggctagagtgcagtggcgtgctcatggctcactgcagctctgacttccccggctcaagcaatcctcctacctcagcctcctagttagctcggaccataggtgtgttgcaccaccatgcccagcttttttgtttgtttgtttgtttttgacagacacagtctcactatgttgcccaggcttgtcttatctttttttttttttttgcaacagagtcttgctctgtcacccaggctggattgcaatagaacgatctgagctcactgtaacctccacttcctgggttcaatagattctcctgcctcagcctcttgagtagctggaattacaggagcccgctactaacccagctaatttttgtatttttagtagagatggggtttcaccatgttggccgggctgatctcggactcctgaccgcaggtgatccactgcctcagcctccccaagtgctgcgattacaggcatgagccactgcacccggcctgtattatcttttaaacctcacaaacaacttgagcaaacaaaggctcagagaggttaagtaacttgtctaaggataaacagccaggaagtggcagttagtacttgaactcacgtctgtgtaactatgaagcccaggctcttgtccaacctcctgtattgccttgtcttgcctcttgccagaatggccctgttttttatactttatttacctcattacttcctgtgtgtgcttcacaactcccctgttcccctggttctcccttcagtgtgaacatcgtctccttcctagtagccaaatatacgtgtaccttttgggatcttcagtaaccctgtcttgggatagtctccccaccagcaccaggtcttgccatctgaccatttgccagttcccacctccccttctctaagagacttcagcacacacctggtggttacaggtggggacagcaggcatctgtgcaatgctggctgattgataatggccctcattgcctcctctaagaagaaaacacagctgttgggaccagacacatggaatggtgtggttgctgtgggtggaccaatgatgttagcatttcatcttgtgacccaatgacccttcagctagcacaggccaaccataggactacggagggttggatctggacaccgggattagaaatgactgagaaaggccgggcgcggtggatcacttgaggtcaggcgttcgagaccagcctggccaacatggcgaaaccccgtctctactgaaaatacataaattagccaggcatggtagtgcgcacctgtaatcccagctactcaggaggctgaggcaggagaatcgcttcaacccgggaggcggaggttgcagtgagctgagatcatgccagtgcaactccagcttgggtgactgagcaagactctgtctcaaaaaaaaaaaaagaaaaaggggccaggcgcagtggctcacgcctgtaatcccagcactttggttggccaaggcgggcggatcacgaggtcaggagatcaagaccgtcctggctaacacggtgaaacctcgtctctactaaaaaaaaacacacacacacacaaaattagctgggcgtggtggcgggtgcctgtagtcccagctactcgggaggctgaggtaggagaatggcgtgaacgcgggaggcagagcttgcagtgagccgagatcgcaccactgcactccagcctgggcaacagagcgagactctctctcaaaaaaaaaaaaaaagmaaaaagactgagaaagtagcctgtacttaacgctttacatagaaagaggcccagctatagcaggggtagggaaagagtgaaatactgtttgaattgatcccttggacagtatgctccgaggttgtcaggagatgcatctggtccaaggatgtgtgctttttctcactctgtcccccttatcattcagcccctgcacaggttctttctttccctcctctctgacccatgagcctctttctcaatttcataccaacttcttctgactcaagtaggctgtgaatgtctgtctccccatcctaagctactgcctgtgtcttcagactgactgtgcatccttgtggccagtttcgctcctgccttctggagtctgcttcctgccaggaggcccctccccctaggaatgtgaataaaccatttcctctgtcctcccagctccagaggattccctgtgtggtattttttatttcttgtgtctgaacttccattggcagaccccttcgtaggctggcccacccttggctgctacagaattgagcttcccacccttcagtttcctctgagggtgagtagtgcataactagaggttcccagtttgtgaaaacacattagtctgagttaaatttcttgtggccaatcctggaggtttggctcattaaagatgataattaacccattgctaattgacctcagaagccagccaagcagcctgtattttaccagccttggtgttggatttgtaggctattttaaggtttcttaataatctcagaaagacttcatgttcctgtctgcatcttatttgctctaaggacattctgtaaaattaacaagctataaagtttgattgaaggtttcaacaaatgtgagaataattggctccatttagagaaacaasaaaaacaacctgtaaacttgagtttgtggggggaaacccgtgtgattgttctctttaacsagaggagcagtagcaagctggactgttaagactagaaaaaagaactggctgatagtacaagtttaaactccgatttctccaaaccaaaaattcagaaaaagaaattttgcaaaatgactagtaaccatggttgtgccttccaagaagcctgtttggagaaaacggggaccaggtaacgatagagcgagtccctcactccctagagcttgcatccagggtcctggctctccagcccttcctcatattccctggctagatttggaggttttctcccttccccggggctgccctgaggtgttaagtcttgcaactcagagcacatgagtatgtgatacctggtgcttagttcccgttctctcttaccctccctaccttcataaagcagcatatagctcgttttctctccccaacccccctcccccgccgggcatctctacccacactgtgcttgttccctaccgagtggctgtgaagagtcaccagttttcagagaacaccattttttcttctttycttttttttttttttttttttgagacagagtctcgccttgttgcctgggctggagtgcggtggtgcaatctcggctcactgcaacctccacctcccagattcaagcgattctcctgcctcagcctccctagtagctgggactaccacatgtactaccacacccggctgatttttgtatttttagtagagatggggtttcaccatgttgtccaggctggtcttgaactcctgacctcaggtgatctgcccaccttggcctcccaaagtgctgacatgacattcgtgagctaccgtgcccagtcaagaaacaccatttttctttacttctccacctctccaccttaaataccccagaacagtaacccagtctactctcttgacctagaggttttctcctttgttcctcgctccccttggctccagcccctacttacccgatgcttacattatctctctctaaggaactgagcctaggagagaacagcctccggtatcgcctctccacatctcactttcagttttcctttctgcttggttctttgcgtgtggacttgattagagtgataactggagccctaaagctaaaggtttcagttcctgctgcagtggtaagctgcctccgacaatcttcaggggaagggaaaggggctttctttcagctcttccctgacctaaagccccagttttctttcccaagctgattgaaatgatttgtatgtgatattttgtcaattaacttgggaattcttgacaatsgcctacacagtgcatctccctccagaagggtcaggactgtgactgagaaggtacaccgcagaggagaggtccgtaggctccccagggtgttccctggctggcggcccttttagtcgcctctatccccagtccagccccacgtgctaatgtagcccaggaagggagcctctcccgyccagctctttctcctctggaggatccagagtttgcccccagagctgcgatatacatgccacttacattctctggttttcattgatatagagtggaaaaatgtgctcasgagcagagttaactgtggggatgatgtcacagacttcatctggagtccttcctctccaagcagggagtccagctttaacccctctcctacyaggaagtcctcctagaccaagcaaagatcatcttggaattggctttttgtcagtggtttgaaaggcttctttcattatgaagtctcttattaactgtatttaaactgtcttgtgttgctttttccctgactcaagtgctggaggctttgtctaggagaatattcccgtaagtctcytacagaactccagcatcaagagagcggtggtcctctccccagtgggcttattccccccaagttaagacagaatgcttttgcagacaggccagtgagctacagacagaaggtttctctgtgcctctgggcaagccctggacattctgccyctcagtttctccatctactaaagagctcagactgtgcacttctcactcccacagtayactttacacagctttgaccatcctccctgctgcttggattgcaaaggacagggtactcttccaaaagacagacaacctttctctctccaaacaggtagaatcctttccaggcctgttaacaccaggtcagagaccccagtagatcacagccttttgcatatcagccagcagttgtccttgtcctagagaaggaactaatagctatgacagacacaatccccaaggaaaccaatttccttctaaatggggcggaaatgaaaactgggagagggctactcctcgttgcttgtgtccatggaataggcaattcccacagaccctgtaaggaagtgctgcaggtggcctcaggatgtccacatccctgggtcctgctgtgccctggaaatccccatctccaggagtcccacatccacacatgtggcttttctccctgtcggccagaaaccatgctttcttagccacgcagcataccatgtagcccgtgctctagcagcagcaacactcctgcccgcctgtctgtgcatgygtccgtggcacactcctgtcctgggcaggtttcctctgcacacttagcaggggtgccagtgtacctctcatcgtccaggtgaggccaaggacaattgcaagcttttcctctgtcctcttctcactccttagctcccctctcctctccattcagtggcagcagcctcacaccaagaaggaaaatcctggacccattacataattctccatagtgcaagcagtagctggggcgtaaggtcagaggtcatagtggggtcaggtggctgacacacactgtaaygacaaggtggttaaaattagaccacagagaggaaactggcagtcttgtggaaatgcagaagtttcctatgcaagtgagaggctrgagatgcagggaggccactgtgcgtgctgcctgccaggctattactcatttcggctctgttctttaatgccttttagcccctgcttctgtatttctagccttcctcatcacatgtttgaatacacgcaatggaaccakgcttacctgccctgggccaagacaagcttcccttctccttcacggaggcaagcccaggaccaggcaccccaagctcaaggggctgaactttttctaagcccttctgggtagccgagaaccttctacatcaacctctcaggtgaaggtggtcaaagtacttagcttgagattccagcctataatggtaacagggccaatggtgagagaaagcagagaacactcctagaccgtgtaggaaagcggggttggctttttggtgaaggtggcagaggatgcagccacagagcacacagttgaccggtgtgtgccgcactttcctgggcagccagcctgcacagcggtgctcatttatttccactgtcttagagaacatgggtcatgcctgcttcatctgctctctgtggtacccagccgagcttccctgggctgtccgtctttactgtgagcctactgtgtgcacagcttgtccttacaattcttgccagtgacgtacgaaaacgatgagatttaggctttgccaccagaggggttgctgtccacatgagagagagaacacctgcacctgtaaaatgatcatcagtagtctccaggttagtacttccctatgtgctgcagatagaaggcttattactgtgaagttcctttcacactaagaaacgaggatgcattaaaagagaggcaggggctagtcagtgaggatgaaggggccgtcccctgtggcacgtctggccacggacgtgtgtttcccatgtggaatggccttcagctttcaagctccagatccagcagggcccctctcccttggtgagcactcagccagtagggagaagaggatgctggaggctagagatgaagagaagggcacacaggggcaagcatggaggagagtgtgagccaagcaaacgggtgtggaggagagggcatgcaggtgtggtgcctccagaaggggggcccagactgggggacggtggacacttaatctgagacacttacacatttgactgttgctcaagatactgagtttcatctcagctaaatcagcccaagcttctctgacagcactgacttgtgtgctgatgtggccacatgggagcaggttggcgtaaacgtcagaaagagtatagctttggtgaaacatccccacctgctctgcctgtctctctcctgacaatttcctgcctgactctagtctcttgagcatgaggagctcttagatagggcaggaacctgtcaggggaagcccaaaatgatctggttgaaatgaaacagccaagaaagcccttagcattcaatttgcacttgggctgaaaattctccttttrggagtctggagcaggggtgctgggagaggagtggagagtggcagcgaggggccccagaaagctctatgctgtgaaagcactccactcttccctctgctggttctagaccaaacttagaagatatgtcatatattctgttttgtatcaggaccttactcaaataaatgtaaggcacctgtcactggtccctggggttgtctgctgccccagagataacctaaggagagataacctcagaagatcttgatcctcagcctgccctgggccctcacttaccacctgacatgcccttgtgccctccgcaccccgtcattcattctgacccccttgcctggtagctttgacacagttcccctgtgcccctcagccggcaagcaacatctcgtctccatcttccctttcagaaaatgctgtttttcttctctccctctcaccctgtaggttattgcagctgactgcaaaagggtcacagtgctgaagtattttctggaagccctttgtggacaagaagagcctctgctggcattcaagggtggaaagtatgtgtcagtggcacccgtcccagacaccatgggaaaggaaatgggaagccaagagggaacacgactggaagatgaggtactatgcgggaagagcccgctgtggcagagggaaggccccctccccattctgctcgtggcttcagcttttcctcctgcttatttatgagcacagagaacagcgtctgtgttaatgtgaccagccagcttctcgagagtgtgctctgatggtgccccttcctgccagtccaccccggtgcctccatcctactccactacgagttccagatgcttcttttaatgctgcattgaggagaagggaggaaaagaaagaaaggagttgaataatgtgcagctctcgaggcttaggaaagggagaggggggtggtcaggatcaagtttatagatgtgtggagcccaatgcagcacaggcctgaactccagcctccagcacacgtacaggaagagctgacattgctggccctgtgtggaaaatcacccctcccctgccctaccctccctcccttgttccctccctccctcctgcacatcctgatgtgattaaggaattctcctcttgtttgtttgcccttggttgttcctgtagcccttgcttcactccagactcgtgtgtgtgtgtctgtgtgtgtgtgtgcgcgtctgtgtgtgtgtgtgcgcacgcgcatgcacatgcatgagcctgtgtacccgcccctgcaawagtccactggcagttgccctgccctatatattgccattgcctatttgtgtctttctgggagtgattgttgatgtgggtctgtgtgtgctgggtttgtgtgtcagtttaagtaaacactgctgccagcttccctgctctctgtgggttctgagtggttgtgagtgtgatgttgttggagcatgtatgcatttagtatcacttccagctgccctgctgtgtgtctgggtgtgggtatttctgtctggatgtgtgttcacacacacctcacttttacctgaaggttgactcttctttttaccccacagtgttaaagacaagagacttaggtgggaaggaacatgggactaagggaagggacggaagcgattctagccaggggccaggtcacccataggccaacacagtcatttggcctgcagcagtctcaagcgcccggtagagcagggcggggtacagggatgaagtcagcaacaggccaaggaagccagatgtcagctggaagctgtcgtttgtgatctgaaacagtgatagagtggccacctttggatcagagtcctgagagcagcagagtcttggactggyttcattagaataactggagagccccaccccacccctgatgacatagggctcagcttccaggacagaggtggttccagggataaagctgagcctaggattccagactctccagatgaaacctgggcagagaataatgggaaagaatgagctgttagcatgggaggggacagcaggcttgctaaagctggcagggcatccaggcttcaggcagggcagagcagtgccacccaagccctgggtactgtgtggggaagcacaggtggagcagtgcctccgtcagctctttcacccgcactttcaggctgagggcacagccaggttagctcccaggcttgcccaaagatgccctgtggccaggggagcctgcagtcccaaatccagtgaggcaagtgaggcccagagagggccacagcaccaaagccagagaaggccttctctgccctcacaaggaacagatgacttctctggtcccggatcttggtagtgccacacttttttttctcgttctaaggcttattgaccagacaaaggttgtgacccacaccaggctgcccacttcttccttttcccacgagtctcctgggttccttcatgttagtggcctctgggaaactgtgcttaccctggtctgtgtaatttcataaccttgcacttcctcgtttactgtgagagctgagccaacctcagacaagcttctctgaccctcttttgacctcagtcaagctcacttcaagccccgtgataaccttgtatatccctagtcagagcaggcagaggcagtgttcccccatgggctaggcaggcattctgtcccgctcactgcagtctgggttaacctcatgaacaaggaagtgaatgtgcagagttttccttctttccacggcctgggcctctctggaggtgagcgctgtgacactatagcatgcctgtgtcagatgaatggtgactgtggacagcatcccagacccctgacatctcttaggatagtgacagttctggccccatcctcagatctcatctctccccaaactgcaaaactgaatcacttcagcagattgggagaggtagggaaaggtgtttcttcagacatagttctttgtgaatagaacacagtttagtcgcttagggatcctaccaaaacacccctagattctgctcacaaggcaaagtatacccccgtcatctacccagccacccacctgagtaatccctttcagtcaagagattccatctgtatatgaccttgagctggacagttagagaagagagcagtctgtactgaacagatctagggtgggcctgcagcaggcctcacgatgctgagccactgagggctggatctgagcttctggtctggattcaggatggcttagcttattattattggtaagagcataaactttggagtcagattcacttgggcttcaatccctgttctgcctttactagccatgtgaccctgagcgaggtgttgacttctaaacctcagtttgttcatttataagatagggatggtgatagcacctatcttatctcacaggctgttgtgaggattaactgagttaatacatgaaaaatgggtagcccggtacctggccagtaataagcactcagtaagtgatagctgttgtcatcactgtcattattataatccagttagaaacaggaaccttctactaaattattccctgtgtacccatgctaaccctgtccctcaaaggaagctatcttgggcagctgcatgttctctgttgaccaaggccaaaagtaagaaagcaaggaatggagcctgggaccacccagggagtgatggctgctaagagctgaggctgcaagtagggaggtgccatccttggggaatgtgccaccagcctggcaggaggctccttaagccagccagccacctcctaccctgcccaggccattgagggcagctgagcaaggtcatgtcrtgtgaattccagtaaaggggcccagcagtcctcacaccaccaggctggagtcttcaaaagaaaccagggcgaggtctgctgagctgcagcatctgtccctgatgctgtctgcggcaagggaacttccacgcctcattcccagctgttggccagagctgattcctatcagatcgttagcatgaattagatttaagttgggtggtttaactttctctgttgtttccctcttgaatcattggtgacttcagaatgaaaataggcctaaagtttgactttgtgagtgtgtaccaggaagaacacagagtgtgagtaaagcacgcaggtatatatgtgtgattgcgagtgacttatggtgtaactctctgagggaaaagccccagagtataaaagagagcagctccgggggaagagtgacagcttttgtcaacctccctttgcctgagtagagggaagcacacaccaggggaccctttgcaagggatggtcccagtctgcgtgggtgaggggccacaagggcaatgttgggttcagtaagagccatgggcccagctaactgtctcctctttgtcctggtcggctccaccacccaaaggaggaggatgtggtgattgaagactttgaggaagattcagaggctgaaggcagcggaggcgaggatgacatcagggagcttcgggccaagaagctggctctggccaggaagatagctgagcagcagcgtcgccaggaaaagatccaggtgaagtcggcctggggagcgtggttcccactatgggggttgctgtctagggcrtgagaggatgtgggcagagagcagagctgagcaggacactaagagtgagtcagtcctgcagtgttctctctagctctacccgtttttcactctaccactaaattctggtagcaggtttggtgcctagagtctccctcatcctgggctccaaggcaggggtacggtcttctcagagactctgagaaaagctgcttccccagtgagaatctccaaatgcacaccacacatacatgatctttcacacaatgtgaggggtttcagagtttccctgagccttatccagatatccctggagaggctgtggattcttacttcagaacgcctgttcccagggagaggatggcatggccacagtctgcttgcctggattcccaatgaaatggaagactcctctggacaagatactccctacacccttgcagagacaaactacttaatctccacacagggactttgacccccatcagccctctcacgggcctgtgccttcacccccagcaagtgtttcttcctggccttctaggtctgttcccttgtgctgtgaggccgtttgctgtcctctagggctcggggcagacagggaagaggcagtcctgctccccgtttaaaggtgaaccgtgtgcatagggaagcatcaagccacscactccgcttctttaaggatgcccatttccaaccctgtcctttggcatagggtttgatgcatgtgatcaggcagacccagtgacagtctaggccctgccacctaaatagctttgtaacatggggcaaatcattcagcttctcagagcctgtttcctcatctgttaaatgaaagtgctggccgggcgcggtggctcacgcctgtcatcccagcactttgggaggctgaggcgggcggatcatgaggtcaggagattgagaccatcctggctaacatggtgaaaccctgtctctactaaaaatacaaaaaattagctgggcatggtggtgcacacctgtaatcccagctactcaggaggctgaggcaagagaatcgcttgaacccgggaggcggaggttgcagtgagccaatcttgcaccattgcactccagcctgggctacagggtgagactccatctcaaaaaaaaaaaaagaaaaaagaaaaaagtgctaatagcacctatctctcagagtcactgtgaggcctacacgagacagtgtatgtaaagcacttagcatagtgcatggcacttagtatgtgctccatgaacggccacctttgtctgatatttgtctaatcaccctggccagggaagaggaataaataccaatcgagagccatcttttttttgtttgtttgtttttgtttttgttttgagacagagtctcgctgtgttgcccaggctggagtccagtggcatgatctcagctcactccaacctccacctcccgggttccagcgattctcttgcctcagcctccagagtagctggaattacagatgcctgccaccatgcccagctaattttgtatttttagtaaagacagggttttgctgtgtgtgccaggccagtcttgaactcctgacctcaggtgatctgcccgcctctgccttccaaagtgctgggattacaggcatgagccgtcacactggccaagatccatcattcttttgttttgttttgttttgttttgttttgttttgttttgttttgttttgagatggagtcttgccctgttgcccaggctggagtgtagtggcgcaatctcagctcactgcaacctctgcctcccgggttgaaacgattctcctgtctcagcctcccaagtagctgggattacaggcgcctgccaccatacccagctaatttctgtatttttagtagaaatggggtttcaccatgttggccaggctggtctcaaactcctgacctcaggtgatctgcccgccttggcctcccaaagtgctgggattacaggcrtgagccactgcgcccagcctccatcattctttagacagattcacgtccctgctaccattggaatcagtgtgtaatacctctaccagcatcatccattgtcatgtggctgcctccccagccctgctgtgggtctacatgtaaacttgtgcatgaycctcaaaacagctttatcctcatgcttcttttacttttttttttttgagatggagtctcgctgtcgtgatctcagctcactgcaacctccacctcccaggttcaagtgattctcctgcctcagcctcccaagtagctgggattacaggcatgcaccaccacgcccagctaattttttttgtatttttcgtagagaccaggtttcaccatgttagccaggatggtctcaatctcttgacttcgtgatctgcccgccacggcctcccgaagtgcccttatgcttcttttcttgctcttccttaccatctgttttcccagaaattctgtttctaccgttatttcttgactctcaacccagcagttatggaaactgttgcgtcaaaagtcaccaatatggccaggcacggtggctcacgcctataatgccaacactttgggaggccacggtgggtggatcatttgagatcaggagttcgagaccagcctggccaacatggtgaaaccctgtctctactaaaaatacaaaagtgagccgggtgtggtggcgggtgcctgtagtcccagctactcgggaggctgaggcaggagaatctcttgaacccaggaggcggaggttacagtgagccaagattgcgccactgcaccccagcctgggcaacagagcaagactccatcttaaaaagaaaaatcaccgatgacctatcttyatcaaaccttagtctgtgtcatagttgaccaatcaccaatgacctatctttatcaaatttcagtctgtgtcatagttgacctccctttgtctttgggccctaaagccaccttccttcagcttcccttcagcatcgatgaatgaccccttgtcttctccctgttcgccagaccaccctcctgggcttcctcaccaccattctttttttggtctcctccatccttccttttactccttagtctcagcaagctgagttagtgctcagcagatatgtattcagtggctgggcgcagtggcttatgcctgtaatcccagcactttgggcagccgaggctggcagatcacttgaggtcaggagttcaagaccagcctggccaacatgatgaaacctcatctctactaaaaatacaaaaactagctgagtgttgtggcgggtgcctgtaatcccagctactcaggaggctgaggcaggagaatcacttcaacccagaaggtggaggttgcagtgagccgagatcgagccattagactttagccctgggcgagactctgtctcaaaaaaaaaaaaaaagtattcagtgacaataatagtagcaactagagcatcatcttaaattccactctggcttttaacccctagtatctaatttcatattaaatactatttattcacacatttattccctcttctcctctctgtttccattgccactactactattctaggtcaagtagttgcttagagtgtagcagtcaaggcccctgcrttgcacagccccagaaggtgccatttgccttgtttctgtaagtggcacctcctggagtttgtagcataccaggctcctgcccaccaggctcctattcactgcactgcctccatcattctcttcctgaaagagccactcccctgctcagaaatcatcaggcctttgcttggctagtaaaaaaaagtcttaattccctattattggcatttaaggctttttgatctgttcccagtctgtttttccagcctcttctcccactaccccatccctcatgaacccttactagttatatgacattgggcagattatttaacttttctgagcctgtttcctcatctttataatgaaagtaatgccagacacagtgggcacgtgcctatggttccaactactcaggaggctgaggctggatgatagcttgagcccaggagtacaaggctatggtgtgcagtgatcatgcccgtgaataaccactgcaacatagcaaaaccccgtctcttaaacacttttttagtgaaagtggtaaaagcaccaatattagagctgctgtgaggcctcggaatgaaccacagtgcacgtaaaatgcctgtgcagacactaaggccctcctgcctggacagtgacacccaccttcctttccactccctaggcatgctctgcctttttccactcgggtttttgttcatgctgtccctcaaagcagagtgccctttttctgctccatatgtcttgttacctgtcgaaattctattcctccttcaatccccagatgaaactccacttccccagtgaagccccccctggtctcccccaggaggaatccgtctgcctctgcttagcgttcctgtgacactcttcaggcttcatttgtggacctgccatcatgtctcatgttccagttatttctggacttgtttcccacattgtctgtgcactccttggaatcgggaggcatgtcttcagctcagtttagcaagcggcattgagcatttactgtgccagtgtctgggggacacagaactaatcacattccagagtgtacagtggtacagtgtggtagagtccttgacaagtgatttgaagtgtgaatgagcgtccgtacaaaacgcaagtccaggatgccgagggagcacatgctgccaggatccatccgcttctggagcttggtgtttagctttgcctctccagcgaccagcagcaccttcagaattggaggtctcctccaacgcttgacttcccgtgcgcctggtgggccctgtccaggctgcctgttctcctgatcagctccttctgaggaagctgcttaggcccaagcatggaaggcctgctgcgggccagctggagttggggttgctgtggcccctttaagaacaggccccacatgcaccaagctggcggccctgcctcctgtcagcctccttcctccagcctcacagccacaagaggatttctcagcagaggaaaaattccccccttcccttccccaccccgctttaatgcccggggcccttcacttccataattcttcattttccagccttgaacgtaagccagacacatctgtctggccatatgcgtgaaccctggagtctgtgccgaggtggctgtaaaacagggccggtgaaggcccttctgggagagcacacacatgtgtgccctcaggccattggcttcctgcccagaaccaygggggcttcagtgctccaaacccatgctaaccttttctcatttttcctctttttgtttaatttaaggggggaaaatccaaggaaaaggtataaattgtcctgggagttggggagaggctcctagctggagaggccattattgttggcaggtacctgggtcacactaatacaataaggaagaaaggagcatcgagtgaattaagattggagggatgggctgtaaattaccctgctctgaactccatcagtctccagggtgttaaccgagaggtgtaaggcaagtccccgttcccagcgcctctcacagatgtggcaaaacaggaaccacgcatgtttggggaaggggatgtgaagatggggttgaaaaaaatcctcctggcccccaggatagctataaagtccaagtgagatctggggctgtaaccacacccccacttccctgctcttacctagacccctgggccgcctaagctcttcygtgagcatgggggaggtgaggcctggtctccctctgcagcctgtccctccctgcttccggcgttgcacagaggctggtgagtggggccgactggaggtcagaaaaggggtgtggggagctctcagrgcctgtgcagctggagctgcagcgcccaggcaggcccctggatgctgggggcgccaagtccgcccacccagggctttgaggccacactctccggctcarcccacgctctgtcttgytgcctgagacagctcctcctgtgggttctgcccaccttgctgcttttctcctgagttctttttgttcccattgccatttggagttgttcagagaccagggcagggtacwtggtttgggaagttggtcagaagtgtttgattcctaaccaaaccaccagggcaaagcagtcactgaaaatgctcctccaggcatgaggcgtggcctcttggcacctcatgctggccctggccctgtgaatcccccgcttcctcactgcctctctgaggctttgctgtgatttgtgctgctgtcgggcggggtcaggtttcctgagcagttgcaaacatcccacctgaaacataacaggctcttcctctggccacatctattgtttccctcagcattatggccacagtcttgctctgtggccagcaatgacatgtgttctcaaaatagcttctctcccctgtccctttcccgcccacccgccctcctgaagatgtagtccctcctttgtggtggccccaggagttccactctaaatttagctgccgtccattcatactgccacccagctagggggggctgttgtggaacaatggggtatacacagagccccccacacctgtatggaagctggcggaaggcagacactcaggcctggctcctggctgtcggagacagggtgggagccagcacagcaccaggccgggggcacgttcacgtcaaggcaggaaagcacatcagcctgtggagcgggcatccgcccttcccacccagacccgctccagcctccccaaaacctgagtgctgggccccagcttttgctccagcaccatccactgggggcctggcttcccacagagtggccaggccactgtctgaaacgccctcaggctgctgctcagagcaagctcaaaggtgtcatgcttagccctgcccctccctctccatcaggaaagggcctgcctgcttctttggctttttagatcaagttatcagttaaaattcaatccgattatctttaagtgcccttcagctctgagagccagtgactgagcccactgtcccccgaagtcctatgatacaacaggcggtatgggaggtatgacaatggaaactgcaagaaaagtaggcagttctccttgagcacttgacagtctagtttgaaaataagatgagtcctcctaaaacagtaagaaatagcaaacaaattgccatagttatcayttttaaaaagagtgcaagaatatattaagctctgtggtacatttggacatccagaaaaggagttctaagcagcagtttttcatttgcagtgtaccccaaatgaagatgctcctcctcctgctcccaggggatgctgctggtggctctgcctgccttttctagcaccctcagtatctgccctcgttggcttctgctggcccaggatgaacagttagccagtgcttatctcacccactgttcctatttttattttatttccagtttttcatgtacatccacatagttaagatacatatatacaataagtcttttcatagaaatcagaagccgggcatggtggcacacacctgtagtcccagctactcaggaggctgaggcgggaggatcacttgagcctgggagtttcaggctacagtgacctgtgatcgcaccactgcactccagcctgagtgacagagttagactctctctctctctttttttgagatggagttttgctcttatcacccaggctggatggagtgcagtggcatggtctcggctcactgtaaccgctgcctcccgggtttaagcgattctcctgcctcagcctcccgagtagctgggactacaggcatgtgccaccatccccggctgatttttgtagttttagtagagatggggttttactatattgtccatgctggtctcaaactcctgacctcaagtgatccgcctacctctgcctcccaaagtgctgggattacaagcacgtgccaccacgcctggctaatttttatatttttagtagagatggggtttcaccatgttggtcaggcttggatgagactctgtctctttttttttttttttttttttgagacggagtctcgctctgttgcccaggctggagtgcagtggcaccatctcggctcacagcaacctctgctgcctgggttcaagcaattctcctgcctcagcctcccgagtagctgggattacaggcatgagccaccacgtccagctaatttttgtatttttagtagagacggggttccgcgatgttggccaggctggtctcgaactcctgacctcatgatccacccgccttggcctcccaaagtgctgggattataggcgtgagccaccgtgcctggtctgagactcgtgtctctttaaaacaaaacaaaacaaaacaaaaaaacgctgggcacagtggcttacgcctgtaatcccagcactttgggggaccgaggcgggcggatcacctgaggtcgggagtttgagaccagtgtggccaacatggtgaaaccccatctctactaaaaatacaaaaattagccgggcgtgttggctcacgcttgtaatcccagctacttgggaggctgaggcaggagaatcgcttgaatctgagaggcagagattgcagtgagccgagatcacgccactacactccagcataggcatcagagcaagactccgtctcaaacaaaacaaaacaaaacaaaacaaaaaaaacacatcagtagtcctctgctccacccctcctcatccccagttctatttcctggtggtttccccctgatatttatgctctggatatgtagaaaataaaaaatagagttaggaaggaagaaaggaagctggcatttattgagttactaatatgtgtcaggcactttgctaggtactttcatatataaggtgaatgtggaaatttcctgtgttacaaagcttctaatttctgttgaagacattgctctggccagagaggctcagggatgaatgattcttcaccctgtagagggaaggaagcagccgcactccctatgggagcccctaagcagaaggaagacctcagaaggccctctcctggtcttgctctgcttcatgatccaggttctccaagtgccacacctcctgtgtcagctcattgaattgctgttacttgtaatgttcagtgtctcagcttgcagcggtaagcatcataagatcatctccaccgtagagaaggaacttaacctgcaaaagtttttcctggagacccaagcctgttagcttcctccttaggtattattgtatatgatctctttcccagttctctgccagcttgctccaggaaactcccataccttagagaaagttagttacttagcaccttccagaaacagaattatttttttcttccacattttatgccaacttgggtccttattgctaccaayctgattcagagtgtccgtgtgttgcttgggttccaagggcactatccagggatcactgtggcccaacctcagctgctgttagaaggttcctgtggaactctccttccgggtcagcacgcttgactccatgccagggccagtctgtctgaaccacagcattccggttgcacccccctcacccccaccagaggcttctgcagctttttactcatacaaacaaaaataaacctcactaccggcctctgaactctgcagcggcatgcttcccctgctccccaagtgtcccatggctgcgagtggggacttggcactctccccaccgacatcactttttcactccctgcgcatcctgtgtcctcctcttaccgtgcgacccagagatcggaatgggacgtgacggccggcacaggcgccgtgcacagctgccaggaatctgacgggtaaaatctggaaaagttgggagggcagatgctaaacacacacacacacacagcgccactcagaaagggccggaaatgcagacacccgtagaagggtgcctgtggactccgaagccctcctccgcctgccactctttttaaggggactgagccagtcttgtgacccaggtgtgaccccccccgcccagaggcccaccggtaccccaggagaaaagggagcagcttcatctcatctcctgagactccatgagggcatgcggggaacaggaagcagttgtttggtgactcactgggcagagccaggttaagggaagttgtctgcgggcgtccctgggaccggatgatggcagcacagctctgaccaccctcacggggcttggccccaccccacacccagggaagccccctctgaaaggctgcggcctattcacctttctagctgcaagccagagctaagaacccggggaatttagagcgtctctggacctcgcttctagatttttcttctgtcctgccatcagaacacacaggtaggctcagtttgtccccagcatccctcagccacctggcttcaaggctctcctgcctaattgccagcaatagaggtaggatggtaccagggcttaggagctgactgttcacatagggtaaaaaaaaaaatggcagccacttccttgatagagtcagaccaggctggacggttgtttctcaaggcaggagaactgagatggtagtggacttgcggggcagaggcagaggcagaggcgcagtgcagagccggacccccagcccctgtcactccagctgccactgctcccacgtctccctaagcyatgcttgttctgtccctgctcacccagaaagacagatttgagagccacggtaccaggagagcatgcctggcaacagaagagctagacggagagcgcatggcctgagaaatgaggaacgagagtgctgatgctcctccgcaagaggagaaagggcagaggggtttactgaacctgagcagggaccatttcctgttcttacaaactgcccaagccaggtttgttggaatgcctgtcaccctctaggtggcagccctatgtagagggtcagtgaccccgcctcccatgggaaggtagcccgcagtagtggcaccttgctctcatgaggtgagatcagtaggaagacttcagcagagcgggcccctgagctgcatttctcatgcctgccagcgttctgtagcctgtgcctttaccagctgtggtggcagtggcagcaacaacttactcatagggagaggtccctggcaggtcacagagaagccacccccatcatttgaaggcatgccctttcagttttactgtcattgtcagtgaaacctgagcagcctcctcactgactgttggtggccaggaccagcactgtgggccccatctcggttggcacgcacgtccacttccccagccctgtgcctgcatctgggtctctgcaagttgctctgtggcagaaggccatgagagggtgtgacagggctgggacctgccctcctggccccgccaggtttgtgtgggtgccctccacctccctactcagggagcatgctgtctgggcagatgccagcagatcagttcgattcttggccatggtccccagaagaggaagcagtgcagtagtggccatgttctgtagtggcagacatacccagagccggtctcgaagggccgctgccacacgtgtaaggctgtcagagaagaaaatcaggcttttgcaaatgtgcatctctcgggaacttccctgagaaatgtgaaagtccacagggaaggcaagcgctgggccacgtgcttggtgagaggtgctagaggaggcggtgggacagtggggccaaggagactcttctgcttttattcttttgtctactttttgtttggcagtttagcttgcactagtaagcatatgactaggctgtcaattgcttagtaccacgatatggttgctgaagaagaggctaagaaaaaaagtgacaaagtcagtttaaagaaaaacgtcgagtaaataatagtgtagctggtacagattcgtggcaaaggagcagaggtagaacagaaaagacccgtgtttaggaaactgcgctggtcaagggcaaggtggtgggccattgtgatcgacctgggtgttgctctttgcagacacatgagttgagtcttaattcatcacattgcacggacttcggctgctgctgcaggagaatttcgtattattagctgtcagtatcacttttttgtatagcctttgagttcaacttcattgttcgttgtttgttgttgttgtttttgttttttgagacagggtctcgttctgtcacccagggtggagtgcagtggtgtgatctcggctcgctgcagcctccgcctccagagctcaggcaatcctcccatgtcagcctcccaagtagctgggaccacaggcgtgtgccaccacacccagctaatttttttttttttttgtagagacggggtttcagcatgttgcccagggtatattttattttgttttgttttgttttagctacacagtgaagtaagtcaaaataacagattctgtttgcattttcatgtctagattgaaaagtacctcctctgtaggctttctagataatgtatgtgaaaccactttcatatctaaggaacctaattctcccttgttgaatttgagtcccagtcttactttgagagacctgttatgttgaatatcctcaggatcctttctcagccctcggcagggttgtacccatgccattccctgggccccttgagctctgttttyattgcagtgctatgctcagcccttgggcctatmcctgagacccgacggggactggttattactgtggaggggaagaggttcctaggggcaggatgctgacacaccgtagtgtcagggccctggctcacccacctgcttgcctgctcgctgtctggctcattcaccactctgtccccataggctgkcctggaggaccrcagtcagatgaggcagatggagctcgaaatcagacctttgttcctcgtaccagacaccaacggcttcattgaccacctggccagtctggcgcrgctgctggagagcaggaagtacatcctggtggtgcccctcatcggtgagtcaggcgggaagggcagagcggccttgcatgtgcacagcagccccctccacacacgccccacggcctgggggccaggcaggcagagccctgctgtgcgtgtgtaagatgggatttgcaggggagtagggaacgcgtggggcaaagaaaactgtttaataatcaaagtagttcacattctcatggctgatccatggcttaaactgcttgagcaaatggactcctgtgtcccagcaaccagaggctgcatgagcccagcccttgtttttatccttataaagcttgcagtaaaacagcaaagctggttcccgttattggtaaacactcagccctggcagataacggcagtgctgctgggtggtctggcagggaggctgggaggattttgaagtggttagatgcctttggtctgattgtcttgtagcttttcatgatcactctgttggttcgaggtagcattcttctggccagtgtcaccctaaggctaggccagcaggaaccctccagagcaagcccttggctcatgcctgtggattcctaccacttgggcccttaccactgtctgggccttggtgctggtgcagggtcagcatctcaggacccagctagcttgctttcccaccctctagccagagaggcccagctgggccgtctccacgggaccgtctgggtacccttagttcttggagctctgtggtgggtcagcctcagggtgggctctgggctctgggctcatatctagctgatggcctctgtggagggagagagtctaggagatgattgggaggcccaggcgtttgcacatccccttctcagcagctacttggagcaagtttgagagccttgtcttctggaaaagccaccagactggcagtctgcctgccaagccacctttgacatccatgccaagatgttccattgggccttccctcccagtcccaagtgtcttagtgccagatgggggtggaaacaaagggcaggaaacatccgcccctgcagaggctgcagaaccctggggggttgtgggaaacacgttagcaccacctgagaatgttggcaccgaagcagccctcctccctgcctccaccctccccgtcttccttcccctccccatgtggcctggccagaacctcttaaatccaggcccttagacctaagggaaggctttctrctcttcaacagtagaacagtttctgtcaccaaggcagggcagcagaaccatcacgttgtcccaggctttcccttctcctcgctggggcgggctgccttgccgggtcatatgtctctctgctttcctacccaggagcttttcaggggaaagaaagtgttttgctagatggtcaggaaagggtacaactgaaagaggctgtggacatctcaggagccccctaagagccgtaaggtgcctcagacgccgtcccaggctgccagggttttttgtcaccaggactgatcgtaccccaggctgtgggctgagtctccttgttcttgatccggtgaaaggcaggctgtagcccttggccctgaggagcttagggtttagtaaggaaatccggattcggtggggagggagcaaacgcatgagaaaacccagcagatacatgcaggacaaagagacgacgcctaagggtgctgggaactgacagttgtgctacagccatacaggccagcctctctggacctgcctcagctgggcaggctcctggactctcccagaggctgtaagaggagggctcctgtttactgatgctttccttggtagactcacgtcctgtgcccagagcagcaaagggttaagccgccagctttcccttcttgtttctggtgctctttaacctgctctgtgctccgcagacctgaccccagcktggagaagccccgcctggtgcagaagcacaaacaagcttcctctttgaagcctgtttagtttggaagcaggaaagcagattttgggatagaatacccgtttttcctgtttgatgttgtttgctgtaccatacacccatctaccactgcttcccaacctcagccatgcactgtgtggacactgcagcctcagggtgccgaaagcatgggcattgtgtgtgtgtgtgtgtgtgtgtgtgtgtgtgtgtgtgtgtgtgtattcccacatgggccctttccagaaagtgtctccgaatacccagacaatgagtgccaggctcaccatggaacagcatgctcacgccggctccctgagccatgaatcactgcgctaaggagaggcctcagaccccaaactctcccagagcccccgaggagcacatatttcccacttgacctcaggcttttggctggaattttggaaagaatcttcaccagaaaatgaagccatgtcccagacacatagggaggcagacaggcacacacacacacacacacagagacatatacacacatgtacacacatacacgcatacacatacacacatgtacacacacacatacatgtacacacgcacacagacacatacacgcacacagacatacacgtgcgcgcacacacacacgtgcagtatcagagaaggtagatgtgccaaggttctggtcttgagaaataccagggccttgcaaatgaggctgtgactgccycttcctccatggtgacctccctgcactccaccagtggggctgggggtagaactttacccctcctggactgcagtgtgtgtgggcccaaggagttaaggaaggacgcctccctttccctcgagctgctgcataccctggactctcctgagggaccctttcacgtgagtcctgtaaccaaggaatgcaatagagggaccagatttcttcctctaaatacagcagctccagaagattcctttaagttcctcccaagaggagggcagggcccaggagaagagacagaaagggagtagagccctgtgaaatctcgagacacttcttgcccccacaagctcccctccggccctagtttcattggaagactcctgtgggggaaggatggattctggtctgggaaggtgttggctgggaaagtgaatggacagaggcstaggatgaaagctgattgctgaggctgataccttgtggggcyctrtctcatcagtgatcartgagctggacggcctggccaaggggcaggagacagaccaccgggctgggggctacgcccgtgtsgtacaagagaaggcccgcaagtccatcgagttcctcgagcagcgattcgagagtcgggactcttgcctgcgagccctgaccagccgtggcaatgaactygaatccatcgccttccgcagtgaggacatcactggccagctggtgagaccctgtggcaggaagggaaagcccacagccagcttccagaacaaggtctccaggaaggaagggctgaaggaggcccatcagcctgggcagctgagggccagccaccatggaggcccaggtgggggagttccttctcccctaagtcactcgtagcacagtcagatcaggccaggcarggccagcgcatgcatgggagggatcggggaggtggccctgcccagggcccccgaggcagaggatccctcctcctcctccacatggcgcccccttctgcccagtggtgcttctcacacacgtcttcctccagggtaacaacgatgatctcatcctgtcctgctgcctccactactgcaaagacaaggctaaggacttcatgcccgccagcaaaggtacagctttgcctccgccttgggatcttccatccccactgccctacctcatcctacccatcctcagcccctgagaagggctccactgactctggcctgggaagtctaaggaatcagtgctcagggctgatgtatgcctgaggcccaacctccctgtcctggctcccccagccccagggaatgccaggtgcaccctgggccaactagagatgagcctagcccaggaagcccagccctaggccgcgaggttcttcaccccgcatgcatccgtttcctttcttgggtgtcctcagtgagttccgtctgacagcaagaatgtctttatgattcactgtagctggtgctggccatggtctcccgagcccagccctctgcagctctgagggcagccccccaggggtccctggggcacacttccctttcttggccatgcttaccttcctaccttctctgttcacccctgagtgtttaccctatttcaggcctggggcagaggcatttccccagtgaatagtgggctttgcttcctggtctctttggtcacaagctgtagcactttgaaggctggctagagtttgaggttggtgagagcttgaggactgagccctcagcccggttttcaagaccttttggggtaagcagaatctcatctttgggccaaaggcccactctgggtttctcacccaagcgcttgaccacctcaccctcaaccctgagctggccttcatgcctcaccccacaggtcaatgacactagggttttctgctcctggctcccaggattctggcatttttttcatttggaaggaattcctaggacctgccagctctgtgtcatctgcagagctggcagttctcaccgtttcrtttctgtctacctataagtggtctcttgtcattgcctttccgtctctgctgctctctcctttctgtgcgtgtttctttctagcccttgtgttcaggctgctctgggagttgactctctcctgcgtcctctccccatacagacacagcccctcactcctgcatgagtctctttactaggggctggttacgagcccacagccgctactcaagagaggtcctgtcctgccaccaggtttgcatgccatatcccttgggaccagatatgagcattaaagtgataaaaggagacctggctgagccaaacagaggaggttatgttctgtccccggcagctcagtagtctctgagtatcccctcacccgaggccaccttcttctcccctctgcccaccacagccccttgcctcccttcacactctccttcctcctgtcgtcttctctcgccaccaccaaccccacaagcctctccctcccaaatcctccaaactcctccccaggctgaaagccagttctcagcctccctgcctggagctggcaagcctgagcttcctagaggggtacctcctgagagaaaggtaggcrggattgctgaaggccttgttgggaagtgtgrttccaggactgctgggccccaccccagcctcagaactttctttctcagaacggacacattttggctttggtcctactagtcctcccacccccgacttcaccccaaacagcctacaggaacccattgccatccgggggaccgcccctatcagaatgacatcagcaatggctggtgtaatcaaagcccatttgtcagtgtgaattcttagcagattaacttgtcagattcacagagaaaccgtcactaaatgtttatgtgtaaacgatgttgaattttaaaatcatgtggattatggcggatggggcctgacaagatgacagtctctggtttctaacaaagtgaagttaccagtgtcaaaacagaggatgtttattgtgaaaaatgtcaaagtatccacagaaacccctgcagacccctgccagcaatgtcggrccttggttagctgacctaaggcctgggacgctcctggtttgaggcccagggcaggaatagtggggctgctacagacgcagccagtcagctgggagccccacacagccctgcataccaccaccccagccacacttatctgcagaggggcctggcccaggcagctgagtagtctctgagtatcccctcacccgaggccaccttcctytcccctctgcccacagccccttgcctcccttcacactctccttcctcctgtcctcttctctcgccaccaccaaccccacaaacctctccctcccgaatcctccaaactcctccccaggctgaaagccagttctcagcctccctgcctggagctggcaagcctgagactgctcaggtccgacatggatatttgcagccccccacccccgccagcccacgcagtcagtgagcacagcaggacacttcctgtgccttgctgtctgccggacctggacctctgtcaggaaatgcccagcctgggactgacgagtagacctgccacccaagcaggcctgtcagggtagggatgtcacttgtgtgagtgcttgtccctggcttaaattctctccaatgtgttaaagattagggagttagggaaagagaggtagtggagagactgtgcttaaaaaaaaaaaaagtcatctaaaaagaatgaaagatatctgtgccactatagcaagaccttttaagtatatactctgaaagtgtggctaatatgatcatgatgctgtaggaaaaaaaggttatatgtccaagtgtatgtacttgtaaatgtgcctaaagaaacctggaaggatacacaggtcttccctggggtacaagacggagaactgggatcatcatcttaactctactcttcctttttactcttctgtcctcttagagactttygcctgtatacatggattactgttacttagcaggggcgaccggttggccaaagccttggtgtgcccttggcacaattctgccaagacccttaccctctcctctcctcagggctcccttaacccctctccccacatctggaaaaccctggatacattttctgttccatctttagttttctgcctctggatgcgtaaagcttcaacctgctggcttttagagggagaggacttgttaaaaaaaaaaaagtggggtgtggggagagyrgtgttgtgatctgggggccagccatgtggtaaaaaggagtagaggtcaaggggctgcttctrttccctcagtttagggtcctgggaggctgacgggtttgggcagcttttgggaactaggcagaagagagtcctgtatgggaggccggagtcaaggcagaagcccagtgcagccctctctaagccagcagggaagggtccccggggctgagagcccggacggaggaaaggactggtagaagagccaagacacggctagcgtggcaccccctccccaggaccacattctccagggtgagaagagcagccagcyctctgcctcctgtcctcagtgacagccttctgctctctcatgcccacagaggagccaatccggctactgcgggaggtggtgctgttgacggatgaccggaacctgcgtgtgaaggcgctcacaaggaatgttcctgtacgggacatcccagccttcctcacgtgggcccaggtgggctgagggagccacactggggcccccccccccgtggaaccgttcctgaaaggccaccaggcgcccagtgtagcacggaagatgcccacgtgcctgagccaccaatccacccagacaataaaccatcctcttccaacccacgccacggccatgctgtgggggacctgctcctcacagagcccctcccaaggatcgggcggaagctgctgggaccctcctgggctgccaggatttagcagggaggtggctggctacagcaacagcagctgggcaagccagataggccgcccatgctctcagcctttctccctcccccgtctcattccaaggctgagggagggccttctcgcctggggacgcagccactttctccagtggagacagggcaggggttcwgagtttccgtcagatgcagtgaaatcacagttccctttcatcttcagaacctctgtcgtgaatgtgttcaagaggctttggttaagtcaggaagaagtgcccagggtgtgtgtccccagtctccctraggcctggactcgcccatgaacccaagtcggcttctagacagcatgtccctaacagcagccctgggcccccacctcttctaccatccaccccagacttaccacacacccttcctgctgctcctcttcctgcccttatcaacctgggtccctcacacttcgccagttgcgtccccgtggacagtcatgagtctagaggaaaggggcatctggtctcaggcccgtgctctcgggtggcctccacctgctccctytctcctcactggcctttctttccgtctagcttcctcttcaggaaatgtcctgactctcctcagctcccccttcacccctccttgcccgcctaccctccctccagaatagcccctcacccttcttccccttctagttgatccttttcacctccctgatccccttcatttcttcaccgcggttcctcgtcataggggttctcactctgaactttccctctctactacccatggcaggaacctagtacaggtctcccacccagggccttccaccctcggctcctgtgctgggagaaacttccaggcgtggacagcccagcctgaggcattccagtgctggggcaccgtcgcctaacctggtttctagctttgccctcactccccggaaaaactgacactgacacaggggccctttccttgcccctttagctggtacctcagtggggaggcttccttaccaagaatgagttcctgaaacccagggccagagacaaggacaacttaggggaagacggggttttcggtggagccaggggcaaatcttaatgggaccagtgggggataccccagagcccatggcctgactgcacagcctgcctggaggatgggtgcgcagctctgccctccctgaggcccaggactatgccagaagcgatggggtaccgtgtaggggagccaaggccagtagtttgggggtaggagtcccctagagtctcagaagactgggctctttggagtacagggtccccggcctcycctttaagattctctccccagctggaaggccgatgactgggtggtcgggagggagacccagctctcctttctgtcccgtttgcagcactggttttgtttccttaataaatttttagttatgaaacatacctgacctcttgctgatctgtttctgggactggggagggaggcaggtccaagcctctgcacctgtgtgagggtggccctttctggctcctccacccagcgggcgcagcccatccaggtccttgtgcaggggcagaagagagcagcggggtcggggtccttggttactgctttattgctgtttggttcgagtatagaaaatggaagcggctctggaagagcctgtgtacaaggtaggaaatatacaaacgaagaggagggagctaaagagaccgcgttccagcccagcccagcctgggctcgggatggggggccgccggggcgcatgcaataaatatggtccggggccgcagggaagggaagggagggcaccgcgggagtgggagacctggtggtaggctcttcgccttccgactccagaactccccgcccttggtgactgaggaaggaagggttggccctggggctagtgccacttgtgcaaaatgaggaacttcacattatcagtcccggggtgggtgggagcgggggtgcggggggccctccggccggctcagtcccctccccactccccaactctgcccgacgctccgaccccagcggggagattcacagtgagaatgggtgtggtcgcaagggccggaggtagggctaggagtgccccgacagtgacacccctccccctctaagagcagcgcggagccgggggagggggccgacgaaccacaggaagaggcgggaggggcctggggtctcctttggtcaaagctgatatcaaaaatataaatttcccttaccccatcccacccccgtcccggggttctcccccgacccccgagctaaggcacgaagcagtgaggccaggtgaggccgccgagaggtggagccgccactgtggcgacgctgcggttgtcccgggcacagtgggccctgcgcgccgcccccgccgctccctggggtgcgggccagggccgcgcagcagcgacagagcgggctggcgaggggcgctctaggtgggagagaaacggtcgatggtccggccgtcgggcccggccgccaggtgagcgccctggctcagcacctcggccgccttgtcggggctgaggcccagctcggccgtgaacttggccagcgggtagaggctctccagcgccaccttggggtcgtgcaggaagtgcgtggtctgcgccagcagctcggccgcggccgccttgtcctgctgcttcaggctcagctgctcggccgtgaggcgagccacagcaaagacgccctcggggaagtcgagcttgcccttgccgtcggggccggggacgccggggagcccccccaagcccgccagcgccccggccgcgccggccgcgccccccacggcgtgcatcttcatgtggctgatgaggttgcgttgctgtgcgaacttgccgccgcacacctggcactcgtagggcttctcgcccgagtggatgcgcatgtgctccgtgaggcggtactggcgcgtgaaccgcatgccgcacgcgtcgcacgcgaagggcttgaggcccaggtggctgcgcatgtggcgcgtcatggtcccacgctgcgtgaacttcttcccgcagatggtgcatgggtagggccgggtcagccagtgcgtcttctcgtgctgccgcagcgtggccgggtccttgtagctcttgtcgcacgacgcgcagcggtagggccgcagcagctctcccaggccacccggagccccggcgaccttgtccccgccgcctccaaaagggggccctaggccggcggccccagcggccacttcggccgcctcggccctgccgtacagcgcttcctcctcctccacgtgagcctccacgtgcgcgttcagctgctcagagctggggaagcccttgccgcacggaatgcacacgtacaggttgtcaccgaagctctcgggctcgccataggccaggtgcgggcatgggtagccctcgaggtggccgccaggcgggctggggtcctcgctgctaccggtctcctcgctgctgctcttgtagtcgtcgccgtcgccgcccgcgccgggcccgtccaggctgccagggtagcgcggcggcggcgccaggccgagcgggggccccccgggcgagacggccgcgtccccaccacgctcttcgcagcgctcgctgggggagccgcgctcccggcccagctcgtcgccatagctacccaggcccggctcgtgcttcatccagcgatagaggagactaggcccgtcggggcggccggggggctcgggtcccgggctgccgctgccgccgcgaaatgggtcggaaggcggtgcggcctcctccagcttctggaagggcagcggcggcagcgacggcagggcgagaggcggctccttgtaggcggcggggccggcgctgggagggctgtccgggcgcgggggcagctcgcgctcagccagcggccgctctggcgccgcggagcccggcgggctcttcttggacaggtccaggccacaaagaggggagcagcggcgctccgaggcacagagtgcggcggccgggccgggtcccgacgcgtacagctcggcgcagtgcgtgttgaccgcggcctctgggcccgagggcggctccgcggcaggcggcggcggaggcccgactggggacgggtagcaggcctggatgaccggcgtggcggcccgcaggccccggcccggccgaccatagggcgcgtagccgccgccgccgccgccgccgccccgcaggtggcagtacttgccgtggcgcttgaggcgtttcttgcacagcgccacgaggtcggggatctgcaggtagctggcggcggccagcacggcgcccaggctcggctcagcccccggggccacggccgcggccgcagccgcctctgcgccgtcagccaggcggccggtgtagatgaagtccagcaccaggcggaacacggccgggctcaccatgtcatggtccaggttgagcaggttgtcatgcaccaccagggacttgaggtaggcgctgctggccgccagcacgttcttgtgcgcgcggaagagggcgttctgcaccacgatgatcacgtcgcacaagaagcccttggtgcgctggttgttgagctgcagcagcagctgcctggagtggccgggcgcctccatcgtgtccagcatcgtctgcccagcacactctcctgcggggacacacaccggccgggtgagagccgtgcggcgccctggccgcctggccccagcccggcacttctcccctccacttccccttccctcagctgagcgggggcatcagccctgcggcctgggcaccggcgaaggaccggctgccctctggagtgggagcccaggccggcccgcccggaccaggagaaggagcaggaggtgagcggccgccggtggaggggaggccagggcggcctgcacgccccagggcacctggctgggtgctggggcttccgagaagaaaactgttcaggcgcagtgacccttttggagacagttacccgatttaagtaaaatgtccgcttcaggaaaagtcattcagggcggagaactttacccaagtagggagaaagggagccgaggaaccagcgcctcccgcctcgggagaagttgccccagttgggggaagtgatacggaggaggggagcgcggtgcccgccctggcgccgccctggccgggggctgtcaaccctcggtcggggcccgggcggcggccgcgcggggagcggaggcagcggctgccgtggcgggcagagcgcgaaggccgggcccggcgcggggagggcgttatatcggggcaggaggctgaggcaggaagcaggtgggggggaggggggagccacgcagctcccaggggagggagggggcagcgccccgggcgggcacggcgcacagccggctgcggccctgacccgggcctgcgccccacccgcgtcccggcctcggcctgggccctacacgcgcgggcccggcgcctccctccgcggctcccccggccccttctcccccggaactccgccgccccaaacttggggaaaagttttccaactgcagacagggcgggaggagtgcgccggccccaggccctcggctcgcagctcttcctcgcggcccccaaatccggcggcagagcccggagccgagccctgagctcccctgcccgctgctcgcccgcccgaccccgttcccctcctggcccgcggggccccgcggcccgttacctgcggtcccggcgggccgggctcccctccccgcggcggtggcagctcttagccgatgccccacccgccgctgccaggccccgagctgtgccagggcagcgcccctgccagccccgcccgccagctccccttcccttcccttcccctcgcctctccagcccatgtgcgggcagagccggccccgggccgctgaccccgccgtgaacccggcgcggagccgcggcccggtggtcctgagtccgaaagggacgacacccggagccctgaacgccagccgccagccgcgatggggcacccgcgccagaagatgcacccgaggcggccgacgcacgaggaccgggctgtcccgggtcccccgtccctcccggtccccggctcgaggacccacctggggggcatgtcgaaagccccgggcccggctgacggcggatccaggggggacgtggctgcgctgccctccgcccgccgggcccccggtcggtctgtcctgctggtccgtcctccccgcgtcctggtcgcgtctcagccccgccgcgctttccgcacactcttatctggagcggcccgggccggcgggcgctgctgcggctatggcgccacctcgcgggcgcgcagggctctgcgcggcaggccgctgccttcctcccgcgcacctgagctggaggcgcacagatgctgagcccgcggggaggggcccaccctacccgcaggttcgccctcccacctgtacccacctgggaccccgaccccggacacgcgagtcccagaaaccctggggctttgagctgagcgctcccatgtacgtatttctaggcacacagccccagttcggaaaagtcctgcccgcgagcacgggactcgggtggtgggggagaggttatcctgcgcaggagtagccgagctctcctggaactccccgtagacattactgtacggcactgtccacttggacgcactccccaacacacccaccctcactcaggcgcatggattcggtgtgcgcggcataaactgatttgtccccagccctatccaggcactgatactaacaggcgctcatgtttccagaagcacacccgccccttcccgcagccctagcgctctgggatactccaggggcagccacgtagggccctccgggaacctgggcagaggtgttacccacacagcccgccctgaactttcgggtctcctaaaggaacccacgacgagtcatcagggcgactggaagtggctggacagcgcctccggggggtccaaagaagtaaccatggggccctagaatccccctgtacgccgttttgaagaatcccgcgtggacttcttctccaacccacccgcccgaaggaaacaacaggggcgcctgcggctgggaccccgcaaggtcccgcgccccacgtgaaggtcaggtttgtgtgggtgacgtctcttctgggagaaaggggaccccgcactgtcgcgccgctgctcgcagtactactccggaagtggccccgtgcagccccgccgcgcaccaagcctcctgcgaacgccggatctccgcggcccacgctccgcctccgccccgcacctcctgacccccgcccacacacggcgtggagcggggggggggggggtccccgagaactccgccgcttccgattggctgcgcctccctccaccgcggagcgcgaggggctggggcgctgcgttaccatggcaaccggtgaggtgcgcccagatcctgtccctccgaggccttggagagcttagcaaccgcgctcgccgccccccgcgct

SEQ ID NO: 96735 - DNA, 26368 bp, Homo sapiens
cgcagtggctcacgcttgtaatcccagcagtttgggaacccaaggcaggtggatcacaaggccaggagtttgagagcagcctggccagcatggtaaaaccccgtctctactaaaaatacaaaaattagaagggcatggtggcgcatccctgaaatcccagctactcaggaggctgaggcgaagaatcacttgaacctgggaggcagaggttgcagtgagccgatatcacaccactgcactccagcctgggggacaaagggaaactccatctcaaaaaaaaaaaaaaaaaaaaacctgagcagagatctcgtgttataaacaggagtaatcaggcaaaaggaagggacaaaggtaggagtcaagaaagaatcctaccaaatagaaaaaaacaaattgtgcaaaagaccccataatgcaagacaggatggcatattcaaagaatgatagaaggccaatgtagcggaagcacagattgtgaagttggaagtggaataagaagagtttggcctttaccaagagatatgagtttagcagggttgtggctaggtcagattttcatttctgaaagatccctatggccagtgtggagagtggattggaagtatacaaatcagttaggagtaatctaggcaagggatggcagcaacatgaactagaatgatggtggaggggatagagaagtggccagatttgacatatttaggagacagaaccaacagggcttggtgactgattagatatagaggtgaaagagaggagtcaaaaatgatgcccaggctttcggtttcaacaacagagggtacaacagttgtacctcagtgtccattggagactggtttcaggacctcccatagataccaaacacagatgcttaagtccctgacatgaaatggcactgttatataccctaggcacacatcctcctgtatcttttaaattatctctagattatttataatacctaatacaatgtaaatgctatataaataattatttacttgtaatgtttatggaataatggcaagaaaaaaaaagtctgtacatttttacaaggacgcaatttttttttaatattctcttttttgttttttgagacagggccttgctgttacccaggctgaagtgcagtggtgtgatcacagctcactgtagcctcaaattcttagggctcaagcagtcctcccacctcagtatcccgaggagctgggatcacaggcacatgccaccatgcccagctaattttttaaatttttttgtagagatgaggtctccctatgttgcccaggctggtctcaaattcctggcctcaagctttttaatattttcaatccaaggttaattgaatatacagatgtgaaacctacagatacagagggccaaatgtgcccttcaccgagacagagaagacaggaggcagtggctttgggaggggaatagcaaaagaaaataattagctcagtttgggcagttgacaaggttaagcagcctgggagatatcctagttggctagtggcagttagataccccagattttaaactagaagtatacacattcagaagttatccgcatacagatggtaactgaaacaatggaaaatggatgagatcacccaaggagaatgtgaacaggaaagaaaatgagaaaagtcagataagaaaaatcaagtgaaagtgatgtcgctagaaagctgagtgagtttccgggaagatgtcatcaacagttttgaagaccacagggtttagataagttttaaatatccatctcatttatcaattgagaagtcgctgtcaatcttagagctatcttaatgtagtagcatgagtagaaacatattgtaatcagttgaaaagcacatgaaagatgaaaattagaaacaaggacagcttattatttttataagtttggctgtgagtgaaagaagaaaggtaaaatactagaagaaaaaggtaacaatgaaaagaatttaacttgtttccatgtggatgacagaaatctgacattttcacatagtgactgaaaactgatgaggacattatctaataaacatttcagaggacatgggcaataaaatgtaggttcactgctaaagcaaccctgataaactctttttccacaggatcattatacattgctaataagaatgcaaaattagtacaatcaccactatggtggtcacttggcatcatctagcaaaatgttaaacgtgcatatcatttgacctgacaattttatatgtagaaatgtatcccacagacatacttgggcaaattatacgtacaagattattcatttacagcactgtttgaacccgaaaatgactagaaataaaccgaatatccatcaagagactacttaagttatggtacatccacacaaactaagtaactgggggtggggacacgggagggggggcgcgatgctttctgtgtactgatacgaaaatctcctggacacattaaacaaaatctaaaagtggagaaaagtgtgaatattactgtctttaaaaaaagagaaaatcccatttatatttgcttaaatatgcataaggaaactgtggaggctgggcttggaggttcacacctgcaatcccagcactttcggaggccgaggcaggtgaatcacctgaggtcaggagtttgagatcagcctggccaacgtggagaaaccatctctactaaaaatactaaaattagctgggcacggtggtgtacgcctgtaatctcagctactcgggaggctgaggcaggagaactgcttgaacctgggagatggaggttacagtgagccgagattgcgccaccacactcaagcctgggcaacagagcaagaccatcaaaaaaaaaaaaagaaactgtggagtgataagaacctcttataactgttataactgtagttacccactgtggagagttcaaactgggcagatggtgggtaagaaggagacgtgacactttaacttgttttttttgagacaaggtctcactttgttctcagctcatagcagtgtcaacttcccaggctcaagcgatcctccagcctcagccccacaagtagctgggactataggtgagcaagaccacgcccagctaatttttctatttcttatagagaggggtctcccatgttgcccaggctgctctcgaactcctgagctcaagtaatccacccgcctcagactcccaaaatgctgggataacaggcgtgagccactgcaccagccaccccactttaacatttttaaattttctggcttgtgagctatgagaatatattacccagccaaaaattatgctttaaaaatcttttttttcgaatttttcttctactgagatagtagttaaaaaagaacaaggaatataatgatgctaataaatttctacaacacaagatataaatgagacagaagtttaaacagctttaaaagtttaagcttttggctgggcacattggatcatgcttgtaatcccagcactttgggaggccgagacaggcagatggtttgacctcaggagtttgagaccagcctgggcaacatggccagaccccatctcttaaaaaaaaaaaaaaaaaattaagcttttgcttcaattttttccatctgatttatcagaagtacctgagggaatagagagaggagatgtagggggtggccaaggaattgagagctataagaaaataaggtttgaattagcagatatggagaatggaaaaggcggctacgaaaatacactagactcaactaagaattttttttttttttttttgagacagtctaactctgtcactcaggctgtggtgtagtggtgcgatctcagctcactgcaaactccgcctcctgggctcaagcgatcgtccggcctcagcctcccgagtagctgggattacaggcgcacgccatcacactaggctaatttttgtatttttagtagatacaggatttccccatgtttgtcaggttggtctcaagcgatctgcacatctcggcctcccaaagtgctgacgggagccaccgcgctcggccactactaagaattccatatgcgcaaacaaacaggtattatacattggcccagtgcagcagaatacatatcatctgagaactgtgacattgtgagaagaggaagttaaaagtcatcctttaagacaatttactttgacttacaaacagtatgaagaaatgtcagactaaaccgagtcccccccgccacccccaccccccgatattctctgtcccggaatatttccaggaccttccacactgcctgacacaggctgacactcaacaattgagctattcgttaagtcgactgtggctttaaggaaaatttttaaagggtgccctttgcttcaaattcaaaacgtaatttatcttacgattctgcacgctacttcaccacaggaaacgaggatcagatctaacggaacgagaaagtgcagagagcagcagtgaacgtaacctggaacattaacactatgttccctgcaccctccgcctctccctaccccagtttcgttcccggcctggtaagtgtgggaacaaggctggggactgtgcagccggcgcatgggaaggccccaaatcctcaatccaatcagttcccaacgctttcctgcttaaatggaccgccacggcgtgtgttttgagcgttcacctaccctcatccgcgtcgtacatattgccaaacggttctcgagctcctaactcttgaaatcaaaagacaaaaaccgcccagaagccagcagcgccaggagctaaagacgaagtaacttccgtctccgacgttcccagaataccacgcgtctcacaccaaaggccgcccacagggacgccaaagttaggatctgcgcctgcgcaaattgtaggtcaagcttgggccggggttagggttgcacacgcgtaaattgtgggccgccgctgccgggctgattgagaggacagctcccgcaatctgcggtcgtatccgttccgtcaatgttttatttctgcttgtttttcaatgttgttgcacaaataacgacacctgaaaacaaaaccaggtatacttattattaaaaagtgttcgtcctgtgaatccgcaacattgggatgctcaatttatttgcctttataaggaccaaaacacgaagctattttttatttttatttatttattattttttgaaatggagtctcgctctgtcgcccaggctggagtgcagtggagcgatctcggctcactgcaacctccgtctcccgggttcaagcgattctcctgcctcggcctcccaaatagctgggattacaggcaagggtcaccacgcccgggtaatttttgtatttttagtagagacggggtttcaccacgttggccaggctggtctcgaactgctgacctcaggtgatccacccgcctcggcctcccaaagtgctgggattacaggcgtgagccacgcgcccggccggaagctcctttctgtttttgttttgttttgtttttttgagacaggctcgctctgtcgcccaggctggagtgcagtggcgcgatctcggctcactgcaacctccgcctcccgcgttcaagccattctcctgcctcagcctcccgagtagctgggactacaggcgcccgccaccacgcctggctaattttttgtatttttagcagagatgggggtttcaccgtgtaagccaggatggtctcgatctcctgacctcatgatccgcccgcctcggcctcccaaattgctgggattacaggcgtgagccaccgcgcccgaccccggaagctcctttttaagtgtgatttattaagggcggcttgtgctagcagtgaggcgttaagcctgaaagtgaaaaaacccaaaacactcactgctcttttctgcccacctagctcaatcctccagtgcctttgccatagctttaagtaggttctcagtctcagagcttaaatcgcgagaactgacgggattagacgcaaaaccaaccaggacagctcccaagtacccacgcgctttcgtctcgggtcaaatgcgcgcctcggaccctagtgcgcgtgcgcgctggtggctccgcccctttggagctacttcctcatgctgcccgctcgcctaccgttcaggctgctgagccttttccttcgtggatccgctcccacggcagygcgccatggcctccgggagccgctcctggagaggaggtgcgctgccgcctcctccttccagcactcatcgagtctgggacgcgagcttccttatgaccccgtggacacggagggctttggagaaggtggtgacatgcaggagcgttttctgttcccggagtacatcctggatccggagccgcaacccwcccgcgaaaagcagctgcaggagctccagcaacagcaggaggaggaggagcgacagaggcagcagcggcgggaggagcggcgacagcaaaacctacgggccaggtcccgggagcacccggtcgtggggcacccggacccggcattgccgcccagcggcgtgaactgctcgggctgyggggcagagctgcactgccrggackccggagtgcccggctacctgccccgagagaagttcctccgcacggcggaggcagacggcgggctggcacggaccgtgtgccagcgctgctggctgctgtcgcaccaccggcgcgctctacgcctgcaggtgagccgcgagcagtacctggagctggtgagcgccgcgttgcggcggcccggcccctccctggtgctctacatggtggacctgctggacctgcccgacgccctgctgcccgacttgcccgcgctggtgggccccaagcagctgatcgtgctgggaaacaaagtggacctcctgccccaggatgctcctggctaccggcagaggctgcgggagcgactgtgggaggactgtgcccgcgccgggctcctgctggcccctggccaccaagggccacagcgccccgtcaaggacgagccacaggacggggagaatccgaatccgccgaactggtcccgcacagtggtcagggacgtgcggctgatcagcgccaagaccggctatggagtggaagagttgatctctgcccttcagcgctcctggcgctaccgtggggacgtctacttagtgggcgccaccaacgccggcaaatccactctctttaacacgctcctggagtccgattactgcactgccaagggctccgaggccatcgacagagccaccatctccccttggccaggtgagttttaggaggctcgccctcttcgtttcctggcaaggtggacgtctggtcctggccgaggcaccgagtacatcctcccttaatgtccactgcgggctgcctgtacccttccctttacaaattctctccccactctggtcacacctctcttctgtgtcagcttactgctagggaaaattgaggatgtgttgtagtaattttcaatggaagtgtttatggagcacgtctctgttcccagtcactaagcactggagatagaccagggaacaaagcaaagttcctgttctggagatttgctttgtaacttctttgtatattgttccagaaagtgtgcgtcctttttactgtctgaacctaatgaactttgtgttttgtttgtttgttttgttttggagacagagtctcactctgtcgcccaggctggagtgcagtggcgtgatctcggctcactgcaacctccgcctcccgggttcaagtgattctcctgcctcagcctccctagtagctgggattcgaggcatgcgccaccacaccaagctaatttttgtgtttgttttgttttgttttttgagacggagtcttgtcttgctctgttgcccaggctagagtgcagtggctcactgtaacctccgcctcccgggttccagtgattctcctccctcagcctcctgagtagctgggattacaggcgcacgccactatgcccagctaatttttatatttttagtagagacggggtttcactatgttggtcaggctggtctcaaacccctgacctcgtgatccgcccgcctcagcatcccaaagtgctgggattacaggtgtgagccaccgcgcctggcctaatttttgtattttcagtagagatggggtttcaccttgttggccaggctggtctggaactcttggcctcccaaagcgctgggattacaggcaagcaccaccatgcccagctaatttttgtatctttggtagagacagggtttcaacatgttggccaggcaggtctccaactcctgacctcacgtgatctgcccacctcgtcctcccaaagtgctgggattacaggtgtgagccactgctcccagcccattagtgcaatttgatgtgtggctttgccgggctcagtggctcacatctgtaattctagcactttgggaggccaaggtgggcagattgcttgagctcaggagttcaggaccagcctgggcaacatggtgaaaccctgtctctactaaagatacaaaaattagtcaggctggtggtgcgtgcctgtagtcccagctactcaggaggttgaggtgggagaatcacctgagcctggaaggttgaggtggcagtgagccctaattgggccactgcactccaatccagcctggacaacagagacccaaaaaaacagaagtatcagtcttgtgactttaagaaacttctgtggccaggtgcagtgggtcacacctgtaatccgagcactttgggaggccaaggtgggcagatcacctgaggtcaggagttccagaccagacctgcccacatggtgaaactcccatgtctactaaaaatacaaaacttagccgggtttggtagctggtgcctgtaatcccagctactcaggaggctgagggtgaagaatcgcttgaacctgggaggctgagccaagatcacaccactgcactccagcctgggcaacagagcaagacgctgtctcaaaaacaagaaagaaagaaacaaacttctgtaattagaaaatgagtccttctatggtttaaatttttttttttttttgagacagaggctcactctgtcgcccaggttggagtgcagtggtgcgatctcgcctcacggcaaccctcacctcccaggttcaagcgattctcctgcctcagcctcccaaatagctggactacaagtgtgcaccaccacacccagctaattttttgtatttttagtagagacagggtttcaccatgttggcaaggcaggtctcgaactcctgacctcaagtgatccacccgcctgggcctcccaaagtgctgggattacaggtgtgagccactacgctcagccaggcttaaatttaagttgacaaaactgactgccccatttgttcccttgaaaccaaagtttcatttagtaagctgctcttctctgtcttgcactttgaattttacagaaaaattacttttatactgaatggtratgtgataaaaatggaaagaaatcgggcctacagattttggattccaattctggtttcccctgtgaactaatctcttaacctatttcctcatttgtaaagtggcagtaattttatattttattacagtaaccaacacagtgtagatcctcaaaaatgttcattttcttcccccttattcccttttgtaaagatgtatttattctgtgtatttcaggtactacattaaaccttctgaagtttcctatttgcaacccaactccttacagaatgtttaaaaggcatcaaagacttaaaaaagattcaactcaagctgaagaagatcttagtgagcaagaacaaaatcagcttaatgtcctcaaaaagcatggttatgtcgtaggtaagcatcctctatgggaaaaccctcrttggtactatgctaaaattctttgttaagcaacctgaaatacagctgtccgaggctagccagtttttgtggggagagactgccttccttattctgcaacaaagaggccctttagcgataaggctactgtttggaaacccagagcagtacaggtagtaaaagtttttactccatgcagcagctttagattaggttgtctgtctttccttggtatatcttttcagcctttctttaaaacagtctgatttccacacacccttgcccccgccactccatgtacacagccagccacacgcttgattattgcaagagttgactcccactgctttttggaaaaaaaaaaaagcaaaagtatcattatggtctcacttccctacactgtaatcttagtaacttgtttgagggaaacataaaaattatgtctggagttaaaagtattaaaggagtgactaataaccttactataayttgttctaggaagagttggaaggacattcttgtattcagaagaacagaaggataacattccctttgagtttgatgctgattcacttgcctttgacatggaaaatgaccctgttatgggtacacacaaatccaccaaacaagtagaattgactgcacaagatgtgaaagatgcccactggttttatgacacccctggaattacaaaagaaaattgtgtatgtatttggtttcttttagaaacatttactwtctttttcttttttaatgggtttatattgcctgctgcccagatacagccaatttatcaagacaggggaattgcaatagagaaagagtgtaatgcatgtagagccagctaaatgggaaactggagttttattactagtcatatcagcctcagaaacatttactttcaattgcacaagtactgctgtcttaattggcagaaaacaggaaaagaagtatacttccattttasactcagttctgattcattcatgaaagctgtttaggggtgaatctgtatgccrtcaagttctgtgttccatttgatagacttcattgctgacaaccaacttattttatcattgtgattgttaccttggttagggaaacgtttacagaagcctaggttttgaggttggaaaaacacataaatatcactggagtccaactccctagtccctgcttgaattacctctgtaacatatccatcaaggggtcctccatcttgaactgaaaggagtgactcaccaaagctgaaactgtcatgtcaccttccaaggtaactcatttgggtctttgaccttctctttgtattgrgtgtactgagctgaatmgtctccctgtaacatgtatccattgttccccaaagccatctgggactaaggtaatacctatttcccttgccagacaaatattttaaaatgtaacgtcccatctcttcttcacctatccctcccttttcttctctttcattacttcatccagcaaacgttgagcattcactgtgcccacaatctggattatttgtcttcatttcctacagctgtgctgtaggaaacaggctattcattggcccaggcctcttcagaatgttttctatgtttgttcttaaagtgtgacactgagaactcagtgctctcaggtgagcatgatttagaatagcattaactccgaccgggcgcagtggctcacgcctgtaatcccagcactttgggaggcccaggcgggcagatcacaaggtcaggagatcgagaccatctgggctaamacggtgaaaccctgtctgtactaaaaatacaaaaaattagccaggaggtagtgggcacctgtagtcccagctactcgggaggctgaggcaggagaatggtgtgaacccgggaggcggagcttgcagtgagctgagatcgtgccactgcactccagtctgggtgacagagcaagactctgtctcaaaaaaaaaraaaaaagaatagcattaactccacctgtcttgtccctatgcctctcttttatccaattgctcatggacaactttgggcctcataggtaactttgactttgtcttgttaaattcagcctatatcttactctgttaaatattcattcaatctcattactttttatatttgcagtttggatcttcattcagatcattgattgactcaaatgtgcatccaggatacagcctcacaacagattcattaatcatttccttcgaatctggttactgaccagtttccrattttctaattatctctgtatctccctacaaaaccacattggtttyttaggtacttttyttggcctcatcaggaacacttatagttacattctcagaattgtattctatttggtgtcccctgtcattgaatcatacacaccttttaaattttattgctctcctggaataattgctcatgccatcttttyttccttagcagtccaaaagttcagagctgctttctaataatattctgtcactttagcttaatgaactaattcttcccccaccatacttttttttttttttttttttttttttgagatggagtctgactctcttgcccaggctggagtgcagtggcgcaatgatcttggctcackgcaacctctgccgcctgggttcaagcgattgtcctgcctcagcctctcgagtagctggtattagaggcatgtrccaccacacccagctactttttgtatttttaatagagacagggtttcgccatgttggccaggctggtctcaaacccctcacctcaggtaatccacccacttcagcctcccaaagtgctaggattgtggatgggagccactacgcccagactaattcttccctttcagatgctattagatcaggcatagcagttacttcagtcatatatcctctattaaatagttgtgtcagaaaggcaagaatttgcaaaatactctagacagcagaatgagaaccccaaatttttagatataaacgtctgtcagcactggtagtttgcttctctgttagtttacagataaacttatttgatgtcttaaaccagggtttcccagactgaaccaaggatctctgttgkgaaatgaaagtattaagactcaggctgtgcacagtgcctcacacctgtagtcccagcactttgggaggccgaggtgggaggattgcttgagcccaggagtttgagaccagcttgggcaacatgccaaaactgtatctctactaaaaatacaaaaaattagctgggcatggtggtacatgcctgtaatcccagctattgaggaggctgaggcacaagaatcacttgatacacttattgggaggcagaggttgcagtgagccgagatcatgccactgcagcccagcctgggcaacagagtgaaaccctgtctcaacaaaaaagagagacaaggtttcccctgttgcccaggctggaatgcagtggcgtgatcaagtaacttcaaagtcctgggctcaaccaattctcccacttcagcctcccaagtagctagggccacaggtacataccaccatgcccaactaattgtttagtttttgtagagacaggacctcgctatgttgcccagtctggtctaggctggagtgcagtggtggaatcttggcccactgtaacttctgcctccctggctcaagcaatcctccacctcagcctccagggtagctgggaactacagacacacgccaccccagctaatttttgtatttttcatagaggtgaggttttgccgtgttgcccagactggtctcaaactcctgagctcagctgggcacaatggtgcatacctgtaatcccagcactttggaagaccaaggtaagtggatcacttgaggtcaggagttcgagaccagcctggccaacatgacaaaaccccgtctctactaaaaataccaaaaaaattagccaagcatggtggcgcacgtctgtaatctcagctacttgggagactgagacaggagaattgcttgaacccgggaggcagaagttgcagtgagccaagatcacaccattgcactccagcctgggtgacagagcaagactccrtctcaaaaaaagaaaaaaactcctgagctcaagtgatctgcctgccgctgcctctgaaagtcctgggattacaggcatgagccaccatggctgacctgcaaatggcttttaatgtgccttttcaaacacaaataatgaagaaaactatctgcagcccccttattatttttttgtgagctgctatgtatcatttctattttttattttcttgttattctctttttttcctttgagacggagtcttgctctatggcccaggctggagggcagtggtgcaatctcggctcaccacaacctccgcctcccggattcaagtgattctcctgcctcagcctcccgagtagctgggattacaggtgcacgccaccacgcccggctaattttgtatttttaatagagatgggctttctccatgttgttcaggctggtctcaaactcctgacctcaggtgatctgcccgccttagcctcccaaagtgctgggattacaggcgtgagccaccrcgcccagcctcttgttaagaaagaagtttacaagttttgtgtccaatttgtaccttctttattcttttttaaccagattttgattccttaaatctttgcagaatcttgtacttctgtctttccttttctatttttctctagtctctctaggaacttgtcatccttagaagggatttattataaatcatagggataaattataaatcctctgtgttataagcataggggatttataactttttctcattctctgctgaatatttgggaraaataaggaaattgaagaccagaatttagaaagaggttcttcagccactttacttgctcctagaatggggtgaccattttgcatttaatgcatgcatacttaccactaggacataaggtcacgtataccattactttaagcrgaaattgctactgcccacaagccttgataaggagagcatatattttctatcttggtattgaatcaacatgttttcaggttcacattaattttgacatttagggaatgctgctgacataggaaagtctcatacacctataaagttattttgccattactgtagattaagttgtaaaacaagggtagagccatcagattgaaattaatttagacaggaagaatctatataaatttgatgcatagcaaactctgacataatttggtttattttgaagtctggcatatttttcatcactttttattttacggktaaatcataatatatcatattttcaataaaagtattttcttaaaaatctgccatttgcttcacagattttaaatcttctaacagaaaaagaagtaaatattgttttgccaacacagtccattgttccaagaacttttgtgcttaaaccaggaatggttctgtttttgggtgctataggccgcatagatttcctgcaggtaagaaaagtctgtactattaaaaaatgattttaaaatattgggattcactttaaggaagcagatgtatgaacacgactgacaaaatgttgataactaagccatgattgtattgggtttaatttgtttttatgtttaaaaatttctgtaataaaaacttggggatggctgggcacagtggctcacacctgtaattccagcactgtgggaggctgaggcaggctgatcacttgaggccaggagatcaagacccgcctggtcaacgtggtgaaaccccatctctactaaaaatacaaaaattagctgggcgtggtggcacacacttgtaatcccagctactagagaggctgaggcaggaagatcacttaaacctgggaggcggaggctgcagtgagctgaaattgcaccactgcactccagcctgggtgatggggcgagactccatatcaaaaaaaaaaaaaaaacttggggaaaagaaatgccctactccctcatccccccaaaaaagtgctaggtcttgaaaacttacgttttcaattgagtaccctacacagcttggcatttaagacaagatactatccctattctatgggatagagtcaaacctatgggataaagtcaaacctttaggtacagggttataggcgttaaattaattccacactttgtataccatgatatgtgtgtttttatgcatacacgtttttgtttggtattcgtttatatagcatctagggattttggagtgtctatagaattgctctccattttgctaaagtgaagagaaaaaggaaaatgaaacatggatatggatatgtccaacaacacaatacaactgtgtgccattactatagcacatttcttgggttttgtgtttgytcatactttgttagaaattttgccttacacacttagaacccttatatatttcgttttgggaggttgttggttttttgcttttggggttggttttttgtttttttgtttttttgttttttttttttgaaacagcatctctctctgttgcccagactggagtgcagtggtacagtcacggctcactgtggcctcaacctcctgggctccaatgatcatcccaccccagccccgcaagtagtcgggactacaggcacacatcaccacacccagctaatttttgtattttttatagagacagggttttgccatgtttcccaggctggtctcaaacttgagctcaagggattcacccacctcggccttccaaaatgctgggattataggcatgagccaccacaccaggcttgcacccttatatatttcatcagaacacataaaatgttaatattttaaacctaactttacacrgagacaattaaagcagatagtatttccttttaatttttaataatagacttttttcaaaaatagtattgggtctgtcaaagaagtcatagtttcacatgaattgctgaaatgcactgcttcagtattgtgcccctgttcttagtaataatttgatttacagctactgccataccagtacttataaagggagtctgattgggtttttgttttttggtttgttttttttttagttgattgtaccttgaatatgcaggttttccaagtttttcaccaggtcagataacttcttcctttcttaagggaaatcagtcagcttggtttacagtcgtggcttccaacatcctccctgtgcatatcacctccttggacagggcagacgctctgtatcagaagcatgcaggtcatacgttactccaggtaaggcaacatgccttgattgcatggttatggttagtatacactgggatggtcccatagctctgttaagaaagcctttgttgtacagaactgttatacaatatcttgagctagctttccctcacctcattctctttgagaattctggctataaagcaaaattgctctatatagactgatcctagaatagccacacagctatttttttctctagactacactgtccaatttggtagccattagcccacatgtggctaagtttaaatatattagtgacaattaaaatttgctcagtggccaggtgtggtggctcacgcctataatcccagcactttgggaggccaaggcagatggatcacaaggtcaggagttcaagaccagcctggccaagatggtgaaaccccatctctactaaaaatacaaaaattagccaggcgtggtgatgggtgcctgtaatcccagccactcagaaggctgaggcaggagaatcacttgaaccagagcggcagaggttgcagtgagccaagatcgcgctactgcgctactgcactccagcctgggcaacagagactccatctcaaaaaaaaaaaaaaaaaaaaaagaaaatttgctcaagttagccaggtatggtggcatgcacctgtaatcccagctcctcgagaggttaaggcaggaggaccacttgagcccaggagtatgaggctgtggtgagccatgattatgccactgcactctagcctgggtgacagagtgaaaccctgtctctaaaaaaaaaaaaaaaaaagggaaaatttaaaatatggttgcttagtgtcaccagccacattttgagtgcccaatagtgacattgttgcaaaaagttgtataaactcctgacagcctcatcaccaatacacacacacacacacacacacacacacacacaccatactttggacaattaagctatagttccccgaactcatcatcctttttccagtttttatctgtacctgtggcgaccgaaaatatctttccaccaaataactttgactcatttctcaaaatattgctcatatattgcttgtttttgttatatatrtatagcttctttactaatgttttccttgactgaacacattcattactccttccttcacaaccatagtacttatagatgcctcacattacatttctgaccttgtattagcttacatattatctacccctttgatttccttgggggcagaaaccatactgcaaaatctatctttgtgttcttagtgctaaacacaggagagatttgctaatgaatagatgaataaattacccagttacagccaagygcagtggctcacacctgtaatcccagcactttgggaggccgaggtgggcagatcaccttgaggtcaggagtttgagaccagcctggctaacatggtgaaaccctgtttctactaaaaatacaaaaaaattggcctggtatggtggtgcgcgcctgtaatcccagttactcgggaggctgagacaagagaatcacttgagccttggaggcggaggttgcagtgagctgatatcgtgccattacactccagcttgggcagcaagagcaaaactccatctcaaaaaaaaaaaattactcaattacttctaatcgtggaaacacctgtaaacataaaagctaaatcttatccattatatatggacccttaactcataaagaccaggcattaatcctgatggccacacctataagaactaaggtacttagaaggaccgtgccttaattgcccaacattaatctatgtgaggccctgtggaggaytctaaaaacagtgtcagtgaagcacaattctcctgtccagaggcttctgccaggtgcttgcccaatgtgtggcccagagccctgagatttgtaagcttcatcccatcacagagttcccttgcttttcatttgaccccagaagtgattgcaagttcttttcaacagttgaatatttgaaaggattttattcttgatccctgtacagaattatcttatcagtgatttgcttaatgttagagttccaagaaatttaatttgaacttgtaaatatctttatttcattggaagattccaatgggtggaaaagaacgaatggcaggatttcctcctcttgttgctgaagacattatgttaaaagaaggactgggggcatctgaagcagtggccgacatcaagttttcctctgcaggtaattttatgccaagcactttttaaaaagtgaataaaagggcaggcacggtggctcacacctgtaatccyagcactttgtgaggccgaggtgggcggatcacctgaggtcgggagtttgagaccaacctgaccaacatggagaaaccccgtctctactaaaagtacaaaattagccgggcatggtggcgcatgcctgtaattccagctactcgggaggctgaggcaggagaatcgcttgaacccaggaggcggaggttgcggtgagcctagatcatgccattgcactccagcctgggcaacaagagccaaactccatctcaaaaaaaaaaaacaaaaagtgaataaagcagccttaccgacaattttttttatagaaaagtgccttaactgatgaaagctgattattttaaggtgtacatactagtttattcataaaatacaacctattctgaaaataaatttgtactttgcacaaacgcattgtatgcttttttaaaactaaggtgtgtccacctgtgcccccagcttctcgggacgccgaggcagtacgatcgcttgagcccaggaacttgagttcagcctgggtaacatagcaagacgcagtttcttaaaaaataataaaataataagagagtgaaagagagtgacagcgttctctgatagtccattttcagctttggtttggtatttttaataagatgattgctaacagccttttgtgttgtgtcacatgcctgcataggttgggtttcagtaacacctaattttaaggacagactgcatctccgaggctatacacctgaaggaacagttttgaccgtccggccccctctcttgccatatattgttaacatcaaaggacagcgcatcaagaaaagtgtggcctataaaaccaagaagyctccttcccttatgtacaaygtgaggaagaagaaaggaaagataaatgtatgagaccgaccttgttcactccagatattaactgtattgaacacaacaaaatacattgaatttgtattaaacatataacgcataaataaagctcccattcttaccctttttttcttttttctttttttttttttctgagactgagccctgctctgttgcccaggttggagtgcagtggcacgatcttggctcactgtaacctctacctcccaggttcaagcaatcctcctgcctcagccccccagtagctgggattacaggcatgcgccactatgcccagctaagttttgtatttttagtagagatggggtttcaccatgttggccaggctggtctcgaactcctgacctcaggtgatccatccgcctcagcctcccaaagtgctgggaatacaggcgtgagccaccgcggccagcctcacccttttcaaagctcttaacagttaacttttttaaactattcaagacttatgttcataatgtattcagcttataaaaagtttttttttttgtatagtatgtatatggtatgtatctgtgacccacatatatataaaattggaagcctgctatattcaagtttctcccactactgttgtttcttttttttttttttttttttttttgagacagggtcttgctctgtcacccaggctgaagtacagtggtgcaatctcggctcactgcaaattccacctcctggattcaagcaattctcatgcctcagcttcctgagtagctaggataacaggtatgcaccaccacccctggctaatttttgtatttttagtagagacaaggtctcaccatgttgtccacccacctcggtctcctaaagttctgggattacaagtgtgagccaccatgccccgcctcactactgttttttatattgagaccagatgtcatttctcttatttggagttagcagtcagtatatgaaaaaatggcaggaaaattaatttctccaaaattcattggcttaaataagatagaagtgagtaggtggctctgctccaaggatccagctggtggaacattccatggccatctgtaggtctaaggtggctgcccaagttgtcatccttttccagcaagggtaaaaagggggaaagtatggagagcaagcaacttccctatttaaaagaagggaagaaaagctggatgttgcacacatcagtttacatagtccacaggtcaagtcacatggccacacccacccataaggaagctgggaaatggaggaggaaatgggaaccatttggggtttttattaaggaaaaatggggagaatggatactagagaacaagtagaaatttaccttacacaatttgacaatgcctgaaaatcttagataaaaaaggattcaaggccagatgtagtggctcacacctgtaatcccagcactttgggaagccaaggcaggagaatcgcttgaggccaggagttcaagatcagcctggtcaacatagtgagaccccatctctattattttttttaataaaaatgaattgtcggctggacacagtggctcaacgcctgtaatcccagcactctgggaggccaaggcaagtggatcacctgaggtcaggagttagagactagcctggacaacatggtgaaaccccatctctactaaaaacacaaaaattagccaggcgtggtgggcacctgtaatcccagctactcgggaggctgaggcaggagaattgcacgaacccaggagaaggaagttgcagtgagccgagatcacaccactgcactccagcctgggcaacaagagcaaaacttcatcccaaaaaaactaaataaataaagatttttaaaaagctatgtatttctagcaactgaggtctattctgcaactgagaggacactttaaccattttatttacatttcatctttatatgactgaataacattacatcaatcagaagtctttattggccaggcgcagtggctcatgcctgtaatcccaacattttgggatgccaaggcaggaggattgcttgagtttaggagttcaagaccagcctgggcaacacagcaagacctcatctctactaaaacccaaaaaaattagccaggtgtggcgctgtgtgcctgtaatctcagctactggagaggctgagtcaggaggatcacttgagcctgggatatggaggctgcagtgagctatgatcacattactgcactccagcctgggcaacagagcgagaccctgtctgaaaaaaggaaaaaagaaaaagtctacaccttttgttattcctagctgagtaagtagtaccacagctgtgtcatgaagaattggcaagtcaagtcccagatcctaatgttgaaataaatgctggtaagataagctaggctgaaacgcagttagagccatgaaattcctgagaggaccatgttctgtcccaacatatgggagcccccatgtatttcacactctcctgtcttctccccactcctcagtcctcttctaagtcctcttagattaaatataatggagaattttttaagatgatgcaacttgttgtagacctttcatagtgtttcaaagtgagtactactggtatcttgggcaaggtggttctttctttatatataaaactgcatttcagccgggcgcggtggctcacgcctgtaatcccagcactttggaagaccgaggcgggcggatcatgagatcaggagattgagaccatcctggccaacaaggtgaaaccccgtctctactaaaaatacaaaaattagctgactgcgctggcgcgtgcctgtagtcccagctactccggagactggggcaggaaaatccctggaacctggtaggcggaagctgcagtgagccaagatcgcgccactgcagtccagcctgggcaacagagcaagactccgtctcaaaaaaaaacaaaaaaactgcatttcattatgtctggtatctctcatcccagacactaaatgcagtagcaactccctctgctgtcagtcctggtgacaactggaaagtgcccccaacatcatattacctctagagggcggcagcttcccaaatggagaaaattgattggcagttgatttctagtttttattttggagggaatgaaataccatttattttataagttaaaattgtgtctgggtgcggtggctcacacctgtaatccaacactttgggaggccaaggtgggtggatcacctgaggtcgggagttcgagagcagcctgaccaacatggagaaaccccatctctactaaaaaaaaatacaaaattagccaggtgtggtggcacatgcctgtaatcccagctacttgggaggctgaggcaggagaatcgcttgaacccgggaggcagaggttgcgatgagctaagaccgtgccattgcactccagcctgggcacaagagcaaaactccatctcaaaaaaaaaaaaaaaaattatggtcattatatttctacctatggttgaaaacaggagttcacagttcagagcttaggccaggatatttaggtagaattaaaacaaaaaacaggcaggaaagaaagccagcaaagggtgaactgggcctttgtggagaaacaatctaaaaactgactactatcaccctgacaacttaagaaaatgtatttcagaaaacagggctcacacccataatccaaacactttgggaggccaaggcaggaggatcccttgaagccaggcattcaagaccagccctggcaacatagttaagaccctgtctctacaaaaaaaaaaatttaatttagctgggcatggtgacacccacctgtagtctcagctattcaggaggctgaggtgggaagatcccttgagcctgggaggttgaggctgcagtaagccatgattgcaccactgcactccagcctgggtgacagagcaagactccatctcaaaaaaaaaaaaagcaggaaagaaagccagcaaaaagagtgagaaagatgctctatgcctagaattagttgaggacttctactgggatctggtattaatttattccatattgtgcctccaatttaatgcagcctaggatcactgctaggatcaagtgtttcctagtagattttcctttaagaaagttccattactgtattggtgcagtagtgcattgcttagcaacagggatgtgttctaagaaatgcatcgttaggcaatttcatctttggacaaacatcataaagtgtatttacacaaacctagatggtatagcctactctacacctaggctgtatggtatagcctatggctcctaggctacaaacctgtacaacatgttgctgtactgaattctgtaggcaattgtaacacaaatcattaggcaataggtattttctgactccattataattttaccagactacggctgtatatgtggcccattgctgaccaagaagtcattatgcgatacatgactgtacttctttatccattaatctgaatataacgacatcttttgaatcggtagtcacttacactatgacagggtacaagaattagtgggctcttctggccaggaacgggaggagaaattaagggcaaagtaccaactcctcacttccacagatcacagaggtggttaggggttgctagaaaacaatgaagcaagtttattctagattgtttacctggctctgcagcactgtggtgttgagcatgtcacctcttttgtattcatgacacccaaaagaagtaaaataaattccatcaaagtactttttgacttttatgtgatattaggttcaaagttttattttaaaaagttacacgtaatccctctgcttttcccccctctaattaaactaaaataacaacatcttcttcaaagttactaagacaaattaaagttgtaatatgttttgtatctttaatcaccataaatgccaagctgtgccgatcactaagtctttactgtatagttccccagagtctagtttatttaacttgagacactcacttcccataacaaccaaggagaagcggagtagagatgcaatcttgtgtgcctgtgtctctagtgttcagactcttcttgcacaatggacataggctggtttcctgcagctgactaacatggaggagctccagctgtgtcagccatgacagagttgttattgcttcactgagtaagcacccagcgcgcaagctgaggcgggctgtttcatagacgggctcggatcatttaccctggcttccctcccacttggctctgtgtcgtggagcattagaatcatttccattctttctcagctgttccattttcttttggccactttcctcctcccagggggattgttttctctcaattgtcaaagagtaatgcttaaacattaaaaacaagatttcagactcgtgaatcaaatcgatgacacctctgcctgctctgaatgtctctctgtcatattatctgcccccattaagaccttgtcgtgagaggggaatggttcaagataggtttttttgttttttgttttgttgttgttgttttattttttcagagacagggtctcactcggctgcccaggctggagtgtagtggtgtaatcacagctcaacgcagccttgacctcctgggctcaagtgatactcccgcctcagccacccgagtagctggaactataggcaggtgccaccacacccagctaaattttttatttttgtagagacagggtctcactttgttgcccaggctggtctcaaactcctagcttcaccaatcctcccacctcagcctcccaaagtgctgggattacaggtgtgagccaccacaccaggccaagattactattttaacatcatattgcagtgatgcctcaccttttcccttcatgtcatggagtttcatgatctgaatactcctaagtgtatctggatcatcctcaaaacacccactgcttggattcccaggttcctgctttcaaaagctgcttttggcttcgcaaataattctccgaatttacctactgtgtagtcaatctagtgggagaatttatttggtcttaatattcttattggtagatgctgtaatagtatgatgcttaatcacagacaccgtcagtacctctacctggtagctgtggtaaattggaaaaaactgaggtcacacatacacaaaacaagcagacacgttagagaatacatcatcatgt

SEQ ID NO: 96736 - DNA, 39814 bp, Homo sapiens
  misc_feature (1)...(39814): n = A,T,C or G
aaaaaaagtaggtcaatgggatagaataaaaaatccaaacacaaacccacacatagatgtacatttgatttatgacaaaagggacgacagtgcagagcagtgaggaagtatctccaaggcatatataaaatcacaataacaaaaatcaacccaggtaaattgtacatataaatgtaaaaggcagaacaataaagcctctagaaataaggtagaaacctatcttcgtgaacttaggatagaaaaaagacatcttttttttggaaagacttcttaaacagtatacaaaaaccaaatagtaagcctaaagaaaaagactgaacacttgactacattttaaaataattattttaaatttgtgtgggtacatagtgggtgtatatatttatggggtacatgagctgttctgatacagtcatgtaattgactacattaaaagttttaaatattctattggcccaaaccaaacaaaacgttattaaaaaggtgaaaaaaacggttgaatattatggtatgtgaattaaatttttgaaaaagaaaataaagtgaaaaggtaagccacagacttggaaaagaaatttgaaacacatatactgataaaagacttacacatccagaatactgtataaaatgaactactataaatcagtaaaagacatacaatctaacgtaaaaattggtaagaaacttgattagatacaccacaaaagaggatgttcaaatggcaaataaacatgagaacgagcaaatccggatttgtcttctctatacgcaatgcttctgccaaaactaccatccacggatttacaggatgtttcattcaccttcatggtgttccacacagcattgcttctgatccaggaattcattttacagcaaatgaagtgtggcaatgggcccatgcttataaaattcactagtcttaccatgttccccaccaacttgaagctggtttgacagaatgatggaatgactttttttttttttcttgagacggagtttcactcttgttgcccatgctggagtgcaatggcatgatctcggctcactgcaacctctgcctcccgggttcaaatgattctcttgcctcagcttcttgagtagctgagattacaggcatgcgccgccatgcccagctaatttggtatttttagtagagacgggttttctccatgttggtcaggctggtgtcgaactcctgacctcaggagttcccttcccttcccttcctttctttctctctttctctctttctctctccctctccctctctctctctttttttgactgagtctttctctgttgcccaggctggagtgaggtggcacagtctcggctcactgcaacctgcacctcccaggttcaagtgattctcctgcctcagcttcccaagtagctgggattacaggcacccgctaccacacctggctaattttttgtatttttagtagagatggggtttcaccatgttggccaggatggtctcgatctcctgacctcatgatctgcccgcctcaggtgatccgcccaccttggcctcccaaagtgctgggattacaggtgtgagccaccgtgcctggcctggaatgaccttttgaaaacacatttatgttatcagctaggtcacaacaccttgcaaggctggagcatggatcttgtctttttttttttttgagcatggatctttagaagactgtctatgttctgaatcagtgttcaatacatagggctgtttcttccacagccaggattcataggtccaggaattaaaggatggaaatgggaatagcacaatgcacaattaccactagagacccctggccactttgggatcctcagggctctgtgtcggcaggcgaagaaagaagttactgtgctggctggggtgattgatcctaactagcaatgaaaaattggaggccgggcatggtggctcatgcctgtaatcccagcactttggaaggccaaggcaggcagatcacctgaggtcaggagttcacgaccagcctggccaacatggtgaaaccccatctctactaaatacaaaaattagccagccatggtggcgcatgcctgtaatcccagctactcaagaggctgaggcaggagaatcatttgaacctggaagccaaaggttgcggtgagccgagatcatgccattgcacctgtaatcccagctactcaggaggctgaggcaggaaaacggcttgaactggggaggcggaggttgcagtgagccaagatcgcaccactgcactccagcctgggcgacagagcaagactccatctcaaaaaaaaaaacaaacaacaacaacaataaataaataaataaaaatacaaaaattagctaggcatggtggcgcacacctctatttccagctactcaggaggctgaagcaggagaatcgcttgcacccaggagaccaaggttgcagtgagctgagattgcaccattgcacttcagcctgggtgatagagtgagactccgtcaaaaaaaaaaaaaaaagaaaaagaaaaattggaatattacttcacaatggaggtaagtatgagcatatcaaggagattccttgatatactaaggaagattccttaggtcatctcagtattactgtgacctgtgattaaggtcaatggaaaactagaacaaaacaatccaggactactaatggcccagacccttcagaaatgaagctttgagtcagtccatcaggtaaagaaacaggtcaacacctgttaaggtgcttgctgaaggcaaagggaataggatagtagtagaaaacggtagctattaataccagctatgaccacgtgaccagttatggaccctaggactatgattgccatgagtatttcctcattttgttatttatatgtttatgtgtgtgtatatcaagcaaatatcttcattttcttttctcttttattccctcataatgtaacataagatgtattaactttatgtcatagttttaagtattattaattttgcatcataatatctgagttatgggatatgaagaagagtaaacatcactcaaggattttacctcctcttctgaggaagggattagtgttttatttttctttttgagaccgggtcttgctctgtcacccaggctggggtgcagcatcaatgcaaagcttcgaaatgcaggctcaagtgttcctcccaccccagcctcctgagtagctgggactacaggtgtgtgccaccatgcccagctaatttttttttttttttgagacagagtcttgctctgtcgccaaactgcagtgcagtggcacaatctctggctcactgcaacctccgcctcccgggttccagcaattctcctgccttagcctccagagtagctgggactacaggcgtgtgccaccacgcccagctcatttttatatttttatgaggggtttcaccatgtttgccaggatggtctcgatctcttcacctcgtgatccgcccgcctcggcctcccaaagtgctgggattataggcgttagtcactgcgcccggcctgtaatggttaattttatgtgtcaacctcactgagccacggagggcccagacatttggtcaaacattaatctggaggtcaggcacagtagcttgtgcctgtaatcccagcactttggttggctgaggtaggaggatcgcttgaagccaggaatttaagaccggccagggcatcatagcaagacccagtcgctacaaaaaaattaaaataaaaaaaaatagttggctgggcacggtggctcacgcctgtaatcccagcactttgggaggccaaggtgggtggatcacctgaggttaggagttccaggagttcgagaccagctggccaacatggtgaaaccccgtctctactaaaaatacaaaaattagccgggtgtggtagcgggtgcctgtaatcccagctacttgggaagctgaggcaggagaatcacttgaacctgggaggtgcaggttgcagtgagccgagactgtgccacctcactccagcctgggcaacagagaaagactcagtcaaaaaaggagagagagagggagagggagagagaaagagagaaagaaaggaagggaagggaagggagaagaaaagaaagtaatctactttctgtctttatagcttggccttttccggatatttcatataaatggaaccatacaatatgtaatcacttgtgtctggcttatttcactgagcataggggtttttttggccgaacatggtggctcacgcctgtaatcccagcactttgggaggccgaggttggtggatcatttgaggtcaggagtttgagaccaacctggccaagatgatgaaaccccgtctctactaaaaatacaaaaattaggcaggcatggtggtgacacctgtagtccagctactcgggaggctgaggcaggagaatttcttgaacccgggcggtggaggttgcagtgagccgagatcacgcactgcactccagcctgggtgacagagtgagactccagtcttaaaaaaaaaaaaagggtttgtttgttttgtttttgttgttgtttctttttgatacagggctgctctgtcacccaactggagtgcagtggcttgactatggcttgacctctggggctcaggtgatcttctcacctcagcctcctggggtagctgggacaacaggtacgcaccaccacgcccagctaacttcttttgtattttttgtggagaaggggtttcgccacattgctcaagctagtctcgatctcttgggctaaaacgatcctcccgcctcggcctcccaaagtgctgggattacaggtgtgaggcacagcgcccagcctgcatattctttttgaggttcatccacattgtagctggtatccatagtttgttctgaataatattccattgtatggacatagcatattttgtctactcattcacatgttaatggacatttaggttgtctccaatttttccaactgggctattatgagtgagacagataagaaaattcctgtgcaagtttttgtgtgtatacatgctttcatttctcttaggcagatccctaagagtgaaattattgggtcacatggtaaatttatgtttaacattttaaaaaattgccaaactgttttccaaagtggctacaccattttacatttctaccaccaatatatgagggttctcgtttctccacattctctccaacacttatctttttaaaaaaggtttttgttgttgttgttgtttgcagtttttacagttttatttaaacagaaaacatacacatgagctgtctactcattttctttgctgcgcagcctgggattggggttggtgactctgacggccagctgggcagctcttttccacgatggctttgcggttcttggaggaaacattgtgagcgatctcagcacagtaagatttgttgcacaacagcagcacttccagctccttgacgtgtggaccaggaatttccggaagccactgggcagcatgtgctttgttttcttgttgctcccataatcaatgttgggcatcaagatctaacccttgaaccttccacgaaccctgttgtcaatacctctgggtttccgccggttacgcttaattttgacatatcggtcagactggtgccggataaacttcttggttctctttttgacgatcttgggcttcccaagggttctgaggacggtttataaaagtgcactgaggggaggctgagacaggagaattgcttgaacccgggaggcggaggttgcagtgagccgagatcgtgcccatcctaggcgacagagagagactctatgtcaaaaataaataaataaataaataaataaataaataaataaataaataaaatgcactgaggagacagatttttgagagttaaaaggaccctctcaaaaaccgaccgcggtcctccactgggtagggggcgctccaagacagggactcttctagcctgttgcctctccatgttagcgatatcctcgttgctaggagactagacgcgtcttacagtgggagagctcagcctcactgatagccggggatctctcctgttcgagggctgagatctccggtcccacaaccgcccacaaccaggggcacttctggaagtcccctttctagggacatttttcttctaarctctgtaacgcgggccgaggcagaccgaggcttctttcccggatccaatcccctgcccccatgcctaagaaagaaaaaatggccaagacgcccctgtccgatgagaagcagctgcttctgtttcagcagaagttgctggcagaggaggagatggccaaaaagaaggagaggctcctcagccagttcttgaaggtgatggccttttgcattatgtcctgctcaaccccatccaccccctgccctggccctgtcactgaggaaacctcattttcatcctgacytcccctcctccggaaatcctgagacccagatatacttagatttcaggcaacattgtttgggaggcgggggtgttctctgcgaagcacggagggggtgcgtggtatacggcttggcaatctttactgaatcccagaactgggaccgtaggtcctgtcagctgtyccagctgtctggaatgctgatattctccctggagataggtcattacaaacaacatcctactctgatgctcccaccctgaaggaaattcacccttgccctccctaaatgccatcaggccgttcccatcgaaaaggggtaaggtgtcagctgataaattaagagtgatcttgtttgttgtactgaaaggccctgacttcctggaggtatatttattccttcacacaggacaagctggccaaggaggaacacaacagtgctctgaaccttaataagattaacacacagtggagaactgtccttcgggaagtcaagaccagagaacttcataaggacattgagatcctcagccaaacatttgaacgagtggtggactgtaaggacaatgtcatcaaggtaggcactctttccaaggaaaccttgagtatggcttcctgacctcttaatagaatgagcctagtgaatccatcttaaagccctcacaagacacaggctgtgagaaagccaggctattggtaataatggttttcacagaaataaaaaatagaatattgggctttcatccctctctcccttagaggacccactcttcttgtcatctattgcccaaaaccagtactatccaatagtagagtcataaggcacagtagacatcacccagtgacttgaaatgagtcccacaccttcatttcaaygtcagaaggctcagttccagaggggaactgacttgcccaaggtcacatagctagtcagtgagagaaccaggactccagcatgtgtttattgattcccactgcagtgctccattcaactaaattgtttggcctcttgattcaacttcagtggccctggataaggttgagaagatctccatgggtaagagcagttctggatttctaagcaattcaatcagccatccttatgctcttgggaggttcttgagttcttgattccatcctatcttttcttctaagggattttctgtaccccttcttttgtcttacttttaatattctgcctccatttactgccttctccttagtcttttccattatttatttatttatttatttgacatggagtcttgctctgttgccaggctggagtgcagtggcacaatctcggctcagtgcaacctctgcctcccaggttcaagtgattcttctgcctcagcctcccgagtagctgtgactacaggcatgtgccaccatgcctggctaatttttgtatttttagttgagatgggggtttcacyatgttggccaggatggtctcgatctcctgaccttgtgacccacccgccttggcctcccaaagtgctgggattacaggcgtgagccactgcacccagccagagtcttttccattttcaacaaaacaaagcccacagtaacagcaaaatatacattgccaacatggtattccccctctagaaaacacacatttctctttcatagcctaatccctggggaaagagctcagcagaccctgggcagcttccagagataaatattaagagtcctcaaatttgcaataaccattattcattagaagtccacataccccaccagttacaccttatggattttttttttttttttttgaggcagagtttcactcctgttgcccaggctggagtgcaatggcgcagtcttggctcactgcaacctccgcctcccgagttcagcctcctgagtagctgggattacaggcatgtgccaccacgcccactaattttgtatttttagtagagatggggtttcttcatgtcggttaggctggtcttaaactcccgacctcaggtgatccgcccgcctcagtctcccaaagtgctgggattacaggcatgagccaccacgcccagccactgaggagtttcactcttgtcaccaggctggagtacagtggcgcgatctcggctcactgcaacctctgcctcctgggttcaagcgattctcctgcctcaacctcctgaatagctgggattacaggcgcccaccaccaagcccaggtaatttttgtatttttagtggagacgggatttcaccatgttggccaggctggtctggaactcctgaccttaggtgatccacctgcctcggcctcccaaagtgctgggattacagacgttagccaccgcgcccagcccataccttatggatttttaagaggctttttcagacacttattggaagttatcaaacacttgataagagggccaggcacggtggctcaagcctgtaatcccagcactttgggaggctgaggcaggcggatcacgaggtcaggagatcgagaccatcctggctaacatggtgaaaccccatctctactaaaaatacaaaaaattagccaggcgtggtggcgggcacctgtagtcccagctactcgggaggctgaggcgggagaatggcgtgaacccgggaggtggagcttgcagtgagcagagattgtgccactgcactccagcctgggtgacagagcgagactccgtctcaaaaaaaacaaaacaaaacaaaaaaacacttgataagaacagcagtgttcattgcctagtgttccattattggaatgctaagtttgtgggagttatgtatctcgtactgttcaaggtcatcgccaagatctgatttttcacaaaaaatatttgcaacctcaggcatgaatgggttaagggaagctgagtagttggccaggttcaccccgagacaattaacttcttcctacacagcagccttgcagcttatgataacagttcttgcttaggtaaatcacacactgttaatattaaccaccttcagggtcattcctgaatgagactacacatattaaatgtggaaatgttagtgatcctcactatctctacttcttcacttccattttaccctgtatcccacagcatctgatttctacccttctctaggaaactgctcaggtaaaggccactggttcagaattgtggctacttttcatcatttagtctttatctaacctaacctctctatggcactgacattcttggtcatgccctgggtcttgaaattctcctttggcttgcatgacaccattctgtcatttttcctacctctgggacataaatcagtcactccagtgagtttatcttcctctctccatcctctgaacttcagcattccccggatttctgagtctggccatctcaccctttaaccagttttctagggccaatcttacacattaccctggctttattttattttattttttgagacagagtctcactttgttgtccaggctgaagtgcagtagcacaatcatagctcactacactcaagctcctgggctcaagtgatcctcccacctgagcagttgggactacaggctctcactatgactggctaaatttttaaattattttaatttttagtagagacaaggtctcgctgtgttgcccaggctgatcctcccacctcaccctctggagtagctgggaccacaggagcataccacctcacctaacaaatttttaaattttttatagagatgcagtctcgttatgttgcccatgctggtcttgaactcctggcctcaagcagtcctcccacttcggcctcccaaagtgctagtattacaggcatgagccactgggctcggtccatcctagattttgcatctatccctgacctttgttactaagtgttgtataagtcgtctactttaaagtagttttcaaagctataccctgctgtccttttccactgtcctcctgtagttgagacctgggcatcatctctaacctacactattagtaatagtttcctgttttccacccttcacattgaactgcctctagattctctgcagaactaccaggattattattattattattattattattattattattatttatttatttattttatttttagacagagtcacccaggcaggagtgcagtggcacaatcttggctcactgcaacctctgccccccgggttcaagtgattctcctgcctcagcctcctgagtagctgggattacaggtgcatgccaccacatccagctaatttctgcaattttagtagagatggggtctcaccacattggccaggctggtctctaactcctggcctcaggtgatccacctgcctcggcctcctaaagtgctgggattataggcatgagtaccaggattatctttctaaagcagaaatctaatcctgtcactccactgtttaaatcttagtggttcccccatctacaggaaaaaatccagactccatagtaaaaacatcaaagccctcatgatctggttcccacctgtacttttctttctctttttttttttttttttttttttgagatggagttttgctcttgttgcccaggctggagtgaaatggcgcaatctcggctcaccgcaacctccacctcctgggttcaagcgattcttctgcctcagcctcccaagtagctgggattacaggcatgtgccaccacgcccagctaatttggtatttttagtagagacggggtttctctatgttggtcaggctgatctcgaactccccacttcaggtgatccacctgccttggcctmccaaagtgctgggtattacaggtgtgagccaccacacctggcctctgcctacctgtacttttcatagccagccttgtttcttacctgtgcctttgcacatgctattccccgtatctggaattctcatctccatttcttctccagtcgtcctggcaaactttcttattatttttatttttatttatttatttttttgagacggagtctcattctgtctcccaggctggagtgcagtggagcgatcttggctcactgtaaccttcgcctctcgggttcaagtgattctgctgcctcagcctcccaagtagctgggattacaggcgtgcgccacgacactcagctaatttttgtatttttagtagatacggggtttcgccatgttggccagctggtctcgaactcctgacctcaagtgatctgcccacttcggcctcccaaaatgttgggattacaggcgtgagccaccgcgcccagcctctttttttttttttttttcctgaracggagtctcactctgttgcccagggtggagtgcggtggtgcaatctctgctcactgcagtctccacctcccaggtttaagtaatcctcctgcctcagcctcctgcatagctgggactacaggtgtgcgccaccatgctgactaatttttgtatttttagtagagacggggcttcatcatgttggccaggttggtctggaactcctgacctcaggtgatccgcctgcctcagcctcccaaagtgctgggattacaggagtgagccaccatgcccggccatcctggcaaactttcattcctccttcaagagttgttacaaatgacagctcttatgaagcctttcccagtgcttaatcagatgtaggcactcagtcctttatatctcattgtcactcaatagatcatcaaccttagagcaatttccatgttatgttgtgattttctatttatgtaactcttcctactagactgtaagctcctttgggagcagtgggcatatctttttatctctgaatcctcaacatccagcacagtgctggtacatagcaggggttaggtaaacatttgttgagtgagtgaatagtcttccattatcagaacctatttcataagatccttttatcattgtaaacatataaggtaaaagctatctctgtgtagaggtcatggtagtttacagtgagtggactcaaggtgcctggatcatgtgggcaattctgtaaatgcttttctgtttaatcttgttttacttttttgaaggtaatacactcacattattcaaaattcaaaagaaaaaaaggttatatagagaaaagttcctccccaccagtgccttccaggtacccagtgttccttccaataattctagtttcataaggaaacttttttctttttttacataaatgatcttattatatactattctgcaccttgcttttttcacttaataatatatcttggaggccgggcacagtggctcatgcctgaaatcccagcactttgggaggccaatgcaggcggatcgcttgagcctaggagttcgagatcggcctgggcaacatggtaaaaccctgtctctactaagaatatgtaaattagccgggcatggtggtatgtgcctatagtcccagctactggggaggctgaggtaggaggatcacctgagcctgggaagcagaggttgcagtgagccaagattgtgctcatatatgtaagagattgttccatattttcccataaagagcttcttattttacaaccgcatagtattctgtattgcagtttaacacattactttctcctctgtatttttattttggtaactggatttagatgcttagcgatgttgtatcaagaggcacatattgtctagctctctttttgtgatgttagcagctgttgatccattaaatcattgggagatgcaaaaatgcttattttaaaaatgtttaaattttattttagaaatagagatggggccaggcacagtggttcatgcttgtaatcccaacactttgggaggctgaggcggcagatcctttgagyccaggagtttgagaccagcctgggcaacatggcaaaaacctgtctacaaaaaaacttaaaaattagctgggcatggtgatgtgtgcctgtagtcccagctactcagggggctgaggtgggggatcaattgagcctgggaggttgaggctgcagtgagctgtgatcatgccacctgaccccagcctgggtgacaggacaagaccctgactcaaaagaaaaagaaatagaaatagagatggggtctggatgtagtgatccggtaagaaaaaaaaaagagaaaaagaaatagagatggtggcctcactctgttgcccaggttagtctcaaactcttggcctcaaacccttgcttcagatgatcttcctgcctcagcctcccaaagatctgggattacaggtgtgagccactgtgcctggcctgatttcctaatagtattattcattttttgttcattagcttgagtatttctgaaaagagatacttcccctcattttctattcaattactcagagctatataggaaaggcaagataaatgcttgattctttctcttgcctttatttaccagttttaaaaaaaattggttgtctggtatcctccagtgataactgatttaaaaaaaaaaacttctggctgggcacggtggctcacacctgtaatcccagcactttaggaggccgaggatggcggatcacgaggtcaggagtttgagaccagcctgaccaacatggtgaaatctcatctctactaaaaaatataaaaaattagccaggtgtggtggtgtgtgcctgtaatcccagctactgtgggaggctgaggcaggagaatcacttgaacctgtggggaggaggttgcaatgagccaagatcgcaccactgcactccagcctgggcgacagagtgagactccatctctctactaaaaaataaaaaaattagctggccatagtggcgggctcctgtagtcccagctactcaggaggctgaggcaggagaatggcgtgaacccgggagagggagcttgcagtgagccaagatcgcgccactgcgctccagcactccagcctgggcaacagagcgagacgccgtctcaaaaaaaaaaaaaaaaaaaaaaattcatgtgcacttggcttctcacagcatgactgttaggctcctggagggaccatcctaagaacaagcattctaaggggcgggaagcagaaactgccaggctagccaagggttatgcctgggactggcatagtgtcacttccaccatattctgttgacccatgtagtcatagggtctgcccaaattcaaggagctggaagaagagacaccaccttttgatggggagtggcaaggtcacatagcagagaattgtaggatgggagatattgctgtgattttctttggaaaatctgcctcagtgaggcacttcatgttggttcctgggtccttctgacatgacccttttggtcttttatagtttctttgctattttttatgataagataccccaggttctgccaggggcggtggctcacgcccataatcccagaactttgggaggccaagccaggtggatcacaaggtcaagagatcgagaccatcctggccaacatggtgaaaccctgtctctactaaaaatgtaaaaaattagctggtcgtggtggcatgcatctgtagtcccagctacttgggaagctgaggcaggaatcgtttgaacctgggaggccaaggttgcagtgagccaagatcgcgccactgcactccagcctggtgacagagcaagactccgtctcaaaaaaaaaaaaaaaaaaaaagataccccaggttcaacttattttctgcatcaggcctcaaagcacccatttctccaagaatccctgattcttttcagtggtagctacatcactgcaaatgttagtcatccacaggacactggctggcttcatggggctctttgctatcacttctttttttcttttttgagacggagtctcgctctgtcacccatgctggagtgcagtggcgtgatctcagctcaatgcaaacttggcctcccgggttcaagcgattttcccgcctcagcctcctgagtagcggggattataggtacgcatcaccacaccagctaacttttgtatttttattatttatttatttatttatttattttgagaccgagtctcgcactgtcacccgggctggagtgcagtggtgcaatctcggctcactgcaacctctgcctcccaggttcaagcaattcttcttgcctcagcctcccaagtagctgggattacaggcacctgccaccatggccggaatttttttttcttatttttagtagagatggggtttcactatgttggccaggctggtctcgaactcctgacctcatgatccacccrccttggcctcccaaagtgctgggattacaggcttgtgccaccgcacccggcatttttgtatttttagtagagacagggcttcaccatgttggtcaggctggtcttgaactcctgacctcatgatctgcccaccttggcctcccaaagtgctgggattacaggtgtgagccaccgtgcccagtcttttttttttttttttttttttgagacagggtcttgttctgtcacccaggctggagtgtagtggcatgatcacagctcactgcaactttgaactcctgggcttaagcaatcctcctgcccaggccttgtgagtagctgggattacggcctgggtaatttttatgggtttttttgtttgtttgtttgtttttgtagagatgggggggtctcattatgttgcccaggctagtcttgagctcccaggctcatgtaatcctcccaccttggctacccaaagtgttgggattacaaatgcgagccaccttgctcagcccttgccatcactcttgctttacacaagagtgagggggacagccagcattcttaaagtcaaagaattggcattaggaacaaagaaaaaactgccagctgaatatatttttattttctcacagagatgctattcagctggaatggtaactctctctttctggcctagtctttagctaaagacctgtccgaagccgaggagcagtacgcccatgccctgcgcagccacttgcacaatgttgaccagctcttggccctgcagaggcrccggctcagtctcctggaggaaagttacaacatggagctggaagccctaaccaaggagtttgagacagaaaggtatgggggcctaagagaagatggggaattgaatccaggggagtgcccagagtccgtgtcaaggagttgcctgtaagcaagtggctagtatcttggagcatcccacattgattatcacrggacccccagcagagaatatcttggttccttttaaacaaactcgggcttaagtttgcagctctagcttccctttactcacgtcaggtccctgtctgtgtaccttcaccacccactttcttctttttttttctttcactatttttttctttattgttttatttttttattttgttttgttttttcaagacggagtgtcgctctgttgtccaggctgacatgcagtggcacgatctcagctcactgcaacctctgcctcccgggttcaagcaattttcctgcctcagtgtccccagtagctgggattacaggtgcgtgccaccacacctggctatgttattgttttacttttttaaataacttttttttcttctttttaaatttaactcctcaaattccttttaccaactacccactttctttctttttttttttttttwattgatcattcttgggtgtttctcacagagggggatttggcagggtcacaggacaatagtggagggaaggtcagcagataaacaagtgaacaaaggtctctggttttcctaggcagaggaccctgcggccttccacagcgtttgtgtccctgggtacttgagattagggagtggtgatgactcttaatgagcatgctgccttcaagcatctgtttaacaaagcacatcttgcaccgcccttaatccayttaactctgagtggacacagcacatgtttcagagagcacagggttgggggtaaggtcacagatcaacaggatcccaaggcagaagaatttttcttagtacagaacaaaatgaaaagtctcccatgtctacttctttctacacagacacggcaaccatccgatttctcaatcttttccccacctttcccccctttctattccgcaaagccgccattgtcatcctggcccgttctcaatgagctgttgggcacacctcccagacggggtggtggccgggcagaggggctcctcacttcccagtaggggcggccgggcagaggggctcctcacttcccagtaggggcggccgggcagaggcacccctcacctcccggatggggcggctggccgggcggggggctgacccccccacctccctcccggacggggtggctgccgggcggagaggctcctcacttctcagacggggcagctgccgggcggagggtctcctcacttctcagacggggcggctgggcagagacgctcctcacctcccagacggggtggcggccgggcagaggcgctcctcacatcccagacagggcggcggggcagaggcactccccacatcccagacgatgggcggccgggcagagacgctcctcacttcctagatgtgatggcggccgggaagaggcgctcctcacttcccagatgggatggcggccaggcagagacgctcctcactttccagactgggcagccaggcagaggggctcctcacatcccagacgatgggcggccaggcagagacgctcctcacttcccagacggggtggcggccgggcagaggctgcaatctcggcacttcgggaggccaaggcaggcggctgggaggtggaggttgtagcgagccgagatcacgccactgcactccagcctgggcgccattgagcactgagtgaaccagactccgtctgcaatcccggcacctcgggaggccgaggctggcggatcactcgcggttaggagctggagaccagcccggccaacacagcgaaaccccgtctccaccaaaaaaatacgaaaaccagtcaggcgtggaggcgcgcgcctgcaatcgcaggcactcggcaggctgaggcaggagaatcaggcagggaggttgcagtgagccgagatggcagcagtatagtccagcttcggctcggcatgagagggagaccgtggaaagagagggagagggagaccatggggagagggagaccatggggagagggagagggagagggagagggaccaactacccactttcaactatcaaaatcctacccatttggcagggaacagggatgggagagagacttctcactgtaaccttttgtactttttttgtatcacatgaatgtattacccattcagaaatcaaaataaaataaccttactcattctttctagccctaaaaagagtaaagccttccctctctcttttctccatcagtacctaagagtttgtaccattcacatagattacatactgctttgaattgtcattattggtcaatatcctgtatccctcagagcagggacagtgtcttgtctcctacaggaagacaattattgaccaacatgagaaagagattcactatctgcaagatatcttcatggccatggagcagaactatatagattctgagtatgaaagcaagctggagttccagagcatgtggaatgatctcaaaaacatggtacggagggagagtagataggcaagaagtgggaggaggtgatagaaaaatgctcaaggaggctgggcacagtggctcacacctgtaatcccagcaccttggtaggccaaggcaggaggatcacttgagactgggagttcaagactagcctgggcaacatagggagtccccccccatctctaccggcccccccaaaaaagaaagaaaatagccaggcgtggtagtgtgtgcctatggtccaagctacttaagaggctgaggtaggatgatcgcttgagcccagaagatggaggctgtagtgaactgtgatagcaacactgccctccagcctgggtgacagagcgagaccctgtctcaaaaaaattaaaaaaagaaaaaaagaaaaatgctcaaggctactagaagtagaagagacccctttagccaacacagtcaataaaacatctattgccccctgtaggtatccctaatgctttttgtaattttgtgaaaattggttgggagggaggaccattctaaattgtcaagggaatgcattttagagctaaaaagcaccaaggagatcatctggcttcacccctgtgattttcagatgaagaaagtaaggcacaagtaagtaaaatgacctgccaaagtcatgctgctggtttgtggtagaatcaggagaatctaggtctcctgccccttgatccaaagtgctttccactgtcctcgaggttgcaatcttagccagcccacagacctaggtttgggtatggagttctttgtttttatttaccccacagtgttttatacaattttttgaataagcatcctacacttaaaaattggagatttcacaaaaacatccaaattttcagcttcccttgaaaaatttaaagatctggcaacactgggccacatttccaaatggcaaggctcacgtggagctcagtgactgcccctcctcctcccaaatgcagcatttcctctccagttcaccacaggccccacccggcccacaaaacatatttatatcatctgcctggtcttgtgtaggcattttcatgggagacctctgtactaaactatgctacaaacagttcaagagggtgggattgctggtagaagtgaaagggcactaataaggtaattccaaacatttgctattttggggtcacttgctagaatttagaagagaagcactttctaagactgcacctggagaacagagtagaagatctgtggagaaagttccaggatgtactcaagaattacactgatgccacagaggatcgaaaggctgcctttgagaccctgcaggtgaaggatgagaagagctccaaagagattgaagtacagatgaaaaaaatacagaaactacaggttagtgtagccacctggaaatactcactgctttaactgctctattatcccctcttttgcttccccttgtttcccctgggcctcatcactgatcattggttgggaaaagatgatatgctctgatttcagtccccaggcagcccttttacctgtctcactgaagaccctcagttggtcaagtagatttcccctaatctactctgttcctctaggatgccataactatttcaaaaggcaagatcatgatacacagccgtgagagtgaagatgagaaccggtatatccgtaatgacaaggaattggtccttgtacaactgcgaaaacttaaggcccaaagaactcaggcccgggcagcatcccagaagaacttagtcagactcaccctggaaagtaatgccaccctcaaggccctgagaaagattgttgataaggtaacacaggggagaggactatcagaataaagtcaaggaacctgcctccctgcaaagtgaaagggatttggaaaggatagcgggggcttcttcctgcttcctggctgagtggacacttggaataccttttttattccatgtttcctcccctcttacattaaattaaattaatttatttatttatgtatttctacagatggggtctcactgtgttgcccaggatggttatgaactcctggcctcaagcagtcctcttgccttggcctcccaaagtgctgggattagaggcgtgagccaccctggtgagccccttcctacttttttttttttttctttttggtgagacagggtctcactctgtctcccaggctggagtgcagtggcaccatcttggctcactgcaacctctgcctcctgggctcaagcattcctcccgccacagcctccccaatgcacagctaacttttgtattttttgtagagatggggtttcgccatgttgcccaggctgggtcaaactcctggcctcagacgatcttcccaccctggctttctaaaatgctgggattacaggcatgagccactgcgttgagctcccccttacattttaattaattatttttttttttgagacgaagttttattcactctgttgccccggctggagtgcagtggcatgatcttggctcgctgcaacctttacctccccagttcaagcaattctcctgcctcagcctcctgagtagctggaattacaggtgcgcaccaccacacccggctaatttttgtatttttagtggagacagggtttcaccatgttggccaggacgttctcgaactcctgacctcagcgatccacccactttggcttctaagtgctgggattacaggcgtgagccaccgcgtctggtctacattttaaattgaaatgaattggccaggcatggtggctcatgnnnnnnnnnnnnnnnnnnnnnnnnnnnnnnnnnnnnnnnnnnnnnnnnnnnnnnnnnnnnnnnnnnnnnnnnnnnnnnnnnnnnnnnnnnnnnnnnnnnnnnnnnnnnnnnnnnnnnnnnnnnnnnnnnnnnnnnnnnnnnnnnnnnnnnnnnnnnnnnnnnnnnnnnnnnnnnnnnnnnnnnnnnnnnnnnnnnnnnnnnnnnnnnnnnnnnnnnnnnnnnnnnnnnnnnnnnnnnnnnnnnnnnnnnnnnnnnnnnnnnnnnnnnnnnnnnnnnnnnnnnnnnnnnnnnnnnnnnnnnnnnnnnnnnnnnnnnnnnnnnnnnnnnnnnnnnnnnnnnnnnnnnnnnnnnnnnnnnnnnnnnnnnnnnnnnnnnnnnnnnnnnnnnnnnnnnnnnnnnnnnnnnnnnnnnnnnnnnnnnnnnnnnnnnnnnnnnnnnnnnnnnnnnnnnnnnnnnnnnnnnnnnnnnnnnnnnnnnnnnnnnnnnnnnnnnnnnnnnnnnnnnnnnnnnnnnnnnnnnnnnnnnnnnnnnnnnnnnnnnnnnnnnnnnnnnnnnnnnnnnnnnnnnnnnnnnnnnnnnnnnnnnnnnnnnnnnnnnnnnnnnnnnnnnnnnnnnnnnnnnnnnnnnnnnnnnnnnnnnnnnnnnnnnnnnnnnnnnnnnnnnnnnnnnnnnnnnnnnnnnnnnnnnnnnnnnnnnnnnnnnnnnnnnnnnnnnnnnnnnnnnnnnnnnnnnnnnnnnnnnnnnnnnnnnnnnnnnnnnnnnnnnnnnnnnnnnnnnnnnnnnnnnnnnnnnnnnnnnnnnnnnnnnnnnnnnnnnnnnnntggtggcaccatctcgtctcactccagcctctgcctcctgggctcaagtgatccttccatctcagcctccccagtagctgaggctgtaggcatgtgctaccatgcctggcttttaaataattttttgtagagatggggtctttctatgtttcccaggctatgaatcaattttacaataagaaaatacttggaatagtgtgtgttacatggtaacctccatttgctatatgtatttattgctattgtttcccacttggatgagtagcttccctgggttcaaacaggggaaccaactccactagcttccctcttcactccctttcctaatataaactctcttcccgcttcaaatagggtgaaaagatccttaaacttgctgaaatatgtaggaaatttgaaaccgaagaagaaaaagtgctgcctttttattcatcagtattgactcctaaggagcaggaggggattcagaagaataatctagaagagcttactgaggagctcaccaaggtaaagcccgggggatggtggggcattgggcagcatttgctaatgggtctcgctgcacaccttctccctgtaactccactcccaggtgatggtggactacataggaatggagaatttctggaaaaggtrcaacaaagtgaaactggagcaactgagcctccaacatagacgagcccagctgctagatatcaatgggaagctgcgggagatgctgaagcagtacttggatggcatctcagtgagtgacgaagtgctgagccagctcaacccactctttatagtcaactatcaaagcaacttactccagcccttgtccatacgtatagcccatccaggtgataaacaacatccaaccacttaaaatataattgaagcagcccagatgatcttccacaacctgtgatctaaggaaaaaaatctttcaactcctagagatttttttttttttttgagaaatgtagggatgttgctattaaaaatttccatggagtttatgagctctttatatcttttccatattggacagagcagttctctttgaggacactaggaacactgtggtcccagggaacagagagaacagctaggcaactaccaggaggctcactgctcaattaagcatccctcctcagaatcagggcaccatgagagccaaaacccataccttaaggacctagagatcctatgggaagactcaagaccaggtccttaaagtcagttaggacagcaagaggaggccaggggaagaggtgatccagggcctacaaccacccccatgccaggcaagatgcaattcacaatgcttttttcctcagccctttacctcattcccactttcaaaggcagtctcagaaaatatcagatgaagaatgcaaataagttttttaaaatttattatttattatttctttttgctcttgtttcgtttctcttccttgagcttctttttggagactttgggtctattggcctttctgtataggtgatacccaatgaggcccaggagggctggcaccatggccatccctaccagaggcaaaatgcccttcaccagctttagccagtagttggctcggattagtgcaatcagctccacgtcatactgcaccactgcatccgctggagaggcagaggggtggagagggttagactctctgcattttatccagggctcagaatctgaatgaaaatagggagcgtaggccacagcaaagccaacaactatgaagctgacaagatttaaatgtgggcttgaattcctttagacaagagtagaggaggatttacgagcagagtccagtgataatcatgttgaccccaactacacatgtggcttgggtccagtgacaagtctttgaatgcaggaaaactttctgtgaatatgaaatgtacaggctcttctccatttgtaagtgggagaaccctctatactaactactaatttatcgtatttccaaataaccacacggatagagtctttgcagggctgaaattaaatggatttaaactagactttaaaaaatcaaccaaccaatgagcacattcaacgtgattatgagataacaggagtttcaacataagagctgaagaggaagaaggatgaggatgctgcttaagaagtaaaggggcaggtggaacagaaatgagtgggcagaagaggtrcaaataagcagcactgggaatggggaggtaatagggctttgggtaaaagtttctccttggtccccctaccctccttccaggccttcctctaagctggaactaggataagaattaacgagcccagccaggcgcggtggctcatgcctgtaatccccgcactttgggaagccaaggcaggcggatcacctgaggttgggagtttgagaccagcctggccaacatggagaagccccatctctactaaaagtataaaattagccggtcgtggtggcgcatgcctgtaatcccagctactcgggaggctgagacaggagaattgcttgaacccgggtggcggaggttgtggtgagtgaagattgcactattgcactccagcctgggcaacaagagtgaaactccatctcaaaaaaaaaaaaagaattacgagcccaatactctgtggagtacaacacattttagctaatagaacatttgttagaactgaaagcaaaagatatgcatcttgggaaatctgtccatctcaacccttcaaaaatagacatcggcagtgaccaatgatggcttttaaagttatggggcagacttggctttaacagttgctttttgttttgttttgaatcacttgactgtgattatttttactgtctcttccctgatggaggctgaaaggaaggggtggggggtggctgtacagctgacacagcgtagagttgtagaaaagggcaggaaagaagtccagtgttctgggaaaggtggtggcacaggcagcagacccatgtggcccaagcaggtctcttccctaacaagttactggctgctggaggtcatgccaggtggcctcatcaggttgtctttagtccctgttggtgatatgaggaggaaaaaggtggccctgtagatggaggccccagccactcctatctgtctaaacaaacttggtctggatcttctcaagcatcaaacaaagtatatagctccttatagctcttagggactgggtattttgatggcctgagagagagtcctagtcagattacctgggacagatggtggaaatccccgttttccataggccaagtgagaaggaatgattgcccttcgcttctctctgagggaaggaatgtcagtcacagccagaggcaggagaggtaggccagcagcctcagtccagctgaagctccttcagcaaaaccccctgaatcttcacacccaaaacacgaatttttccacctgaacaccaaacaggctggccagcaaaggtgtccatctccccatgtgcctcaactcccccgacaaaagcaacagcgcaagaggcacagaggctytgaatgccctcagaggtcccactgacctggacctgtccagtgggaagcagggtcctttattccacattctcctgcttaaggagtgaggatggccgagaaagcctctacccatgcaaagggggtacccaggcccacccctgccgagatactcaccccacacacatgtcgagaagactctgctccagaccttgaagaagaagacacaactgaactggaagctatccaccttccccaaatcccatgacatgaagatcaaagtcttcctcctccatcctcaattgacctttccctcacttcttaaatctctggcttccaataggatatgggacaagtggagtactagaagtgaggtttgaacctcaggaggtaactcgtagagccctagggtcttactcatttcaggggggatttccagggcagctttggagccgaagaggctaagaaagggcttaggttgggaagaggtggaatgggaggcacaggtcacatacctggaatcacctgcttttggccaagttctataaccagagggtctctggtcagggaggtgtcaataatacgtccatctaccaagcttccctggggggagagagcatcaagagcatacatctagcaccctctccctcccagcaggcgcgcaacacacacctggaccgctgggcggcggcagcccccttagtgcggcagcctagcrttccccttaccgctgtaaggaacaggaagccccagaaggctggcgcttctcggagatctctccaccctgcacttctccgtgccaggtaggaactggcagaaaagcaaggagggaaaagaggcacggaagagcaacgtctctcccctcgccacgtgctcgacgaccccagagccccgagtttcttctcccgaaccgcttgccacgtgtccaagccaaagctgacgtgtttcagcagggcgccgccccctcccagrccccgccccggccccccagacccctcaccgtgtagtgtatgtgaagcgtgtctccaaaagcagcgggctcggcacatggttctgggggctccacctacgatcggactacaggggtcacggatgctcttccaaagatcccgttctcgcccctagacccggcaccacccccaactcagttcccgcacttcctctcctcccggctcccaggttcgctgagaccccagtattaccacccaacaaggctcggcccacgggggctgagggtcgggactatctcctcaccagggtctccacttggagggtccggacgggactttcggtttcgagcccagcctcagcccggcacaccgccgcactgagcagcagcagcagcagcagatggagcgggaggagtgaggggcgcagggtcatgactgggcgcggggcagggagccggggcaccaggacaggctgttcgggtggcggcagcyaggacagcgttcccgcggcgcccaggccagactggacgggacggggcgggtcgcgatgctagagctcctcctcctgcagcccttcctccaccttgtccccacctccgaaagggaggaggccgaggggcgccctctgtaccctccaagatccggagggcgcaggttctgacgcatccgttagacgttctgtcctataacgtgggtcgggccaaayaatagcacccatttacgattacctactgtgtgtcaggagctagtctctaatcctcaaaaccaccctgaaaggtcggcatgattgtttccattttacagataaggcacagggtgctcaggatgtgcccaaggtcatcaggctaggtggtgacagagacaggattcaaacccaggactgcctgagtccaacgtggttgctgtctgttcttccaagtygtctccttgtggctatcctggcagtgtctggctggcagaccccacccaggcagttctcattcctctccgacctccagctacttcagcttgaatttctggaggttatagatccaagtatccgaaataaggcagggggctgtcctatccctgtcctttgaaaagctagctgaaaagagcaaggagctgttatcctgtaagaacagggtaaatccctgatcttttcctctggtgctactatttcctttctcctttcatcaacaaacttctcaaagggcagcacacgtaatccatttatgtaaagacttcacttttttttttttttttttttttgagatggagtctcgctctgtggcccaggctggagtgcagtggtgccatctccactcactgcaacctccgcctcccaggttcaagcgattctcctgcctcagcctcccaagtagctgggattacacccgccaccacgcccggctaatttttgtatttttagtagataaggggtttcaccatgttggccaggctggtctcaaactcctgatgtcaggtgatccgcctgcctcggtctctcaaagtgctaggattacaggcgtgagccaccagatttcttttttttttttttttttttgarggggaggagttttgctcctgttgcccaggctggagtgcaatggcgcgatcttggctcaccgcaacctctgctcccgagtagctgggactacaggcatgcgccaccatgcccagctgattttgaatttttagtaaagacagggtttctccatgtctgtcaggctggtctcgaattcccaacctcaagtgatccacccacctcggccttccaaagtgctgggattacaggtatgagccaccacgcccagcccactttttaaaagtttttgttgttgttgtttgttgagacggagtttcactcttgtcgcccaggctggagtgcaatggcacgatcttggctcactgcaacctccacctcccgggttcaagcgattcttttctctcagcctcccgagtagctgggattataggcacccaccaccacgcctggctaatttttgtatttttagtagagatggggtttcgccatgttggccagactgctctcaaactgctgacctcgtgatccgccagcctcagcatcccgaagtgctgggattacaggcgtgagccaatgcgcccagccaacagtcttaactgtactcattcttccaatccacctgcaacaacctagacttcctccctatctcctgtttctgttagtggctctgctaccagcattcgttcttctctcatctcccacatccaacgggtctactctggattctccttccaaagtctctccagctcttcccttccattcccatagctacaaccctcccacctcaggataagaagccttcattatctctcatttgtattgtttaaaaaaaaaaagtcccctcagcaggagggaatttctaggggtgatgaaatgctctatattttcagaaggatgtgggttacatgggtgtatgcatttgtcagaacttatcaaactgtatacttacaatctgtgcatttcactgtttgcgaattacgtatcaagatattttttaagttaaacaaaaaaaccacaaaactccaagtctcccttaaagctggatatggccagttgactaagttctggccaagagaacataaacagaagtgttggaagtattgtcctggacttccaagaaggccctttaaagagttaactagaaagcgtccttctgtgctgctctctctccccctaatcatctttccttccttctgtctgctatctggaatgyagatgagatgaattaagctctagaagccatattagaccatgagatgaccatgaggatggaagctgcacgctaggatggtgaagcaaaaagaagcataagtccttgttaattgcagagccaccatgccagctctggattgcctaccaccagacacttttatttttcagttctatctgaagccccattctttgtgggggaaaaaaaaaagactagtcaagtgcagtagtgagaagggggaaagagtagttcaatctgtaactggccgtgaacaattgagatgcctatcttcagaccagctgccagataccttttttttttttttttttttttgagatgggggtctctgtcatccaggctggagtatagttgtgtaatcttggctcactgcaacctctgcctcctgggctcaagtgattytcctgcctcagcctcccaagtagctgggaccacagaggcatgccaccacacccggctaatttttaaattttttgtagagatggggtttcgccatattgcccagactggtctcgaactcctggagtcaagtgatctgcccccttcggcttcttaaagtgctgggattacaggcatcagtcaccacgcccagctcacctttttttttttcttttgaccgagtctcgctctgttgcctaggctggagtgcagtggtatgatctcggctcactgcaacctccgcctcctgagttcaagcgagcatatctggctaatttttgtgtatttattatttgtctatttatttgagacaaagtctcactctgtcttgcccaggctggagtgtaatgctgtgatcttggctcactgcagcctccacctcccaggttcaggcaattctcctgtttcagcctccagagtagctgggactacaggtgtgtgccaccacaccaggctaattttgtatttttagtaaagatggggtttcaccatgtcggccaggccggtgttgaactcctgacctcaagtgatctgcctgcctcagcctcccaaagtgctgggatcacaggtgtaagccaccatgcacggcccccagacaccttttaactgaggcagaaataaacttctatcttttttttttttttttttttttgagacagagtctgactctgttgcccaggctgtagtgcagtggtgcaatctcggctcactgcaagctccgcctcccgggttcacgccattctcctgcctcagcctcccaagtagctgggactacaggcgcccgccatcacgcccagctaactttttgtattttttttttttagtggagacggggtttcactgttagccaggatggtctcgatctcctgacctcaagatccacctgcctcggcctcccaaagtgctgggattacaggcgtgagccaccgcgcccggcctttaaacttctatcttgtttaagaaaagaaaaaaaaaagtcttggtgtggtggctcacacctgtaatcccaacatttttgggaggctgaggcaggaggattgcttgaggccaggagttcaagaccagcctgggcaacatggcaagaccctatctctacaaataatttaacgattagctaggtatggtggtgtgcacctgtggtcttagctactcaggaggctaaggtgggaggatcacttgcgtccaggaggtcaaggctgcagtaagccatgatcacgccactgcactccagcctaggtgacagagaccttgtctcaaaaaataatamgcccctgatccctagcctctccctactttggaccactgtgtacactgctgctatctacagtttcagtcccatcatctgcccactaaaaagcctaccatggcttcacattgcccacgtgaataaaattccaactccttgacatgacaactgaaagcttgtcatccagccctaatctgcttttccaaacttggcttttattccattaaactgaatccctcttagagacaggaacctcatgtttctcatttctaaatcttcattgctagtatagtgtctgacacatcaatgctcagtaaatgtttgtgaattgagccaaattcccttcctgctcatggactgtggtctggcatcagacaaacctacatcttctgtttccatctctgtgcctgaactcatacacttcttttacctgtcaagctccctccaggctaagctcaaatatcatttcctctgtgaagtcctgattctcttagctaggatctccaggcatacacttgtggacattattatatttttccttttgttgcagttatttgtgtatgccccattcctcccttcctatctcccccaaagagccagctaactgatggcaaggtcaaggttgcaatcatgtctggagctaagtactagctacacgatagcctccaaataatagattctagacagtatgttttactttgaagaaattatactatgaaatactgagaagccattaaaaggagatctaattacactaatatagaaaatctctaagacaaatgtatatataccctaagtaaaaaagcaagtagcagaataacagatgtgatatgagcccatttatattttaacccctccacaaacatgtgtcagcacatacatttaaaaaaggaactagaaggatgcacatcaaatagctgaggatggttacgtttgggcatgggagagagaagagtaagggsaatgtcccacatgttgctctgtatatttttgtattgtttggatcttttacaatagaaattactttggttataatttttttcctgctcagatgttacttctcaggttataaaaataatttttaatattaaatattacacgaataaacaagatatatagcaatacaagggaatgagtgggaggtgttaaatgagttgtgctaacagagctaaaggagccaacgtggggaaaaactataaaagtccttgtagttgcagagggcacaggcagctttgtggaggaggtgaaacttgagctagatcttggagtgggatttttaaacaagtgagaaaggaggtgaaggcagagggccagatgtttgggaaaaatgaatggactgatttggctaaagtaagggatttggccagagactagagagaggtggctggagagggaattaagggctagttgtaggccgggtgcagtggctcacgcctgtaatcccagcactttgggaggccgaggcgggcggatcacgaggtcaggatatcgagacccatcctggctaacacggtgaaaccccgtctctactaaaattacaaaaaattagccaggcgtggtggcgggtacctgtagtcccagctactcgggaggctgaggcaggagaatggcgtgaacccaggaggcggagcttgcagtgagccgagatcgcgccactgcactccagcctgggcgacagagcgagactccagcttaaaaaaaaaaaaaaaaaaaaaaaaaaaaaaggctagttgtgaagaaccttgaatgtcagactaaggcagtgggaacacattgcaagtttctaagcaaaaggatgacacagcatactgcactgatgtatcagcagactcgaacagtgtggtgaaggtggaaggctattgtcttatccaggtctgaggctctgttcaggaacctgaaggggaagaggagtggagtaggagaaggtggtagtagaaatggaaagggcaaaactattaaacacaatatccacccacaggcagcacaagcccatctgcaccctggagggaccagagaaggagctttttccttggatcaagttagaagaaatccaaacaacagagaaaggtgagatgattcttggaaagataggagagttggcccacccctggctggagatacaacttaatcacagaaccattgctagaaaagcctccacactcaaaggtgtctctgtcagtgtgtaggagaaaccctaccacagtacctgggcttccaagactcatggggcacccaccatgcccagcttgattaaagacaatggtgtttattaattcatccatttgttcatcaaggttgcatgactattatgtgccaaagaataagcagaacactgctctttaaatgttcttaagtgtttayttataacaggttgttaataaagtaaaagcctgagttggcatatataaatttgggtttaaaatttgattttggttgagacagggtcttgctgtgtcaccagtgcggtggcgcaaacacagctcactgcagcctcaatctctcaggctcaagcaatcctcctgcctcagcctcctgagtagctgggaccacaggcacgtgccaccatgcccaactaattaaaaacatttttttttggccgggcacaatggctcatgcctgtaaatccagcactttgggaggctggggtgggaggactgcttgagcccaggagtttgaaaccagcttgggcaacatagtgaaatcccatctctattttttttaaataaaagtaaaaatatatatatatatataatataaacatataattgtatatatatcatataaacatatatttatatatatatatatatatatatatatatatatattttttttttttttttttttttttttttttcttatagagatggggcctcaccatgttgcccaggttgatctcaaactcctgggctcaagctatcctcccacctaagcctcccaaagtgttgaggttatagaattgagccaccatgcctggcctggtgttgtattttcaagggtatacatacccccagctgactagatgttttctttcaggtatgtttatgcatatattcatccaagaatgaagcacttacttacttcctccactcttcccctatggctgttctaatcaaagaggtatcatcccataaatgcaagatttggcaaagacaagaacagattccccatctcctatctataacctaaggccaagagtgccctttattactatattcagaactcagaaagaattcctgtgggttagagccccaagctaagccctccaagccttaaaagtccttctattcaattctgtgctgggaggaccctgaacgatatatgggatggaggggtgaaggtggaagtggggggaagcaggtgccaggcggacaagcccattctcaaacctgctgcctcgcctggattgactgccagacagctctcaatatgcctggtttgtgaggaagggtgagggaaggaagggtacatgggtagaactggtcagccctctgcatagatagccagggttttggattgagtatcctctcttctacaccatgttcagctcagaagccggaagtgctcctcaactagaggccagatactctcttctgcaactcacagccaacatgacacacacaaacagacactcatcttcaagccttgatggtgaatggtctcaacccaacttcctcacatctacacctccaaccactgccttcggtggctttgctccctttacctgactaaatgattccatttcctctgtcctaaccctcttcccttttctcaggaattcagagtcattcttacccataccagcaatcagggtcaggaaacccaatcagaaagaaaaacttgaagaggaaggcgggcatccggatcctatcactccccagtgaccagcaagacactctctctccaggtactgggttggaaagtgagagaactgaattctggctctcctaccttcacactcttcagaactggaaaagaagcttttctgccaggcacggtggctcatgcctgtaatcccagtgctttgggaggccaaggtgggcgaatcacttgaggtcacaagttcaagaccagcctggccaacatggtgaaaccccatctctactaaaaatagaaaaatcagctgggcatggtggcacatacctgtagtcccagctactcggaggctgaggcaggagaattgcttgaacctgagaggcagaggttgcagtgagccgagatcacgccattgcactccagcttgggcaagagtgagactccgtctcaaaaaaaaaaaaaaaaattagcagggagttgtggtgtgcactcataatcccagcaactcggaaaaggctgaggcacaagaatcgcttgaacctgggaggcagaggttacagtgagccgagatcacgccactgcattccggcctgggtgacagagactgtgtctcaaaaaaaaaaaaagcttttcttaataatattactgctgcccaaagacatgactccctacactaagcagcagcaatggaaggggtgtcccccaactctcactacccaacgtggtatactacagatgtcccaaaaggattccacagcatcctagaaatggatccccagccccctccctgagttcagtggtttgacctacttttagcagatgcctaaaaacatcgaatgtactaaatacatacttgtcaacttcctgctgtaaccaacctaggcgcttgaactggaagtggtgtatgcagtgaatccccagagcctttagaccttatacctcaaggctgagaaacccacacatacattcattctctgccactgcccctatactctgcaatgaaggggagggttttgccctccatcccaccttagccaacctaagcccttccactggctttctacaggctcatttgggaagctcccttgcccagattatcctgaagtggaccctgggtccaagtcttccgccagtccatgactgatgctatgcatgttctggaagatgggattgctgtttgtcctaagagctgggtgctaagtatctacctcccaggttcagtctcctcttcatcccctatcccctcaaaagaactggaaggcttcagcaactgccacaagagggctcccctctacttccttcctggcattctaaattgagtactaagggacagatgggaataggtcatcctcttccccaagttgttcaggggtccaaagaccccccagtggcccaccattcagctaaagtcctctcccttatcattatgagaggttgtagctctgaaagatatctatttgctaatatagaaataaaacacctggccgggcgtggtggctcacgcctgtaatcctagcactttgggaggctgaggtgggcagatcacctgaggtcaggagttcaagaccagtctcactaacatggagaaacccatctctactaaaaatacaaaattagccgggtgtggtggcgcatgcctgtaatcccagctcctcaggaggctgaagcaggagaattgcttgaacccgggagcccaggaggagaggctgtggtgagccgatatcgtgccattgccctccagcctgggcaacaagaccaaattccgtctcaaaaaaaaaaaaaaaaaaaaagaagaagaagaaagaaaacacttgggaaagatactcttatcagcaccctgtcaccaagcagaactttggagaagcctggaaggaggaaagtgtcatctgatcttgaggagtaggtgggtaatgttcaaagtcattgggattgataagacatgtctggttggagtagtttgagagttatatatgggtggaagcactggtccttgagggtgatggcctattaataatagaagtgctgaaaaggaaaattggcaggggaggcagcagggaagtaactgaatataaattatatgcttcacactggtacttggggctctcaaacttattatatgcctaaatcctatccctttcccacaaaagcaggctgggaagacctctgtcctcaaagcttaagaaaatattaagattggggaaggcttgcctggctcacccagacctcacccaccctaaaggtagcaccatccctttctttgcctggagccagacactggtagcaggggaggaacagaatagtggtgggagtgcgatgggaggatggaggctttatggaaaaggtctattcctcaagacatttgtgggatctctggatgaggcttggcatcctgacaatgaaaaaccacacgcctgaagtagagctgatgcagggccatcagttgtaagaaggattaaggtcattacactgcccagacgtttatccttcatgtttattcactgccaaagtccagaactagactagtgagggggtctctgttcaaactagaagcacctcatgtgcaaggctgaggagatctgagagtagaggcacatggggccctccaagttcagggcccttcagccagtgaagtccatacagtctaccaacaggtgagaaatacagctgatttcaggtttaaaccctttagaactagaggaggaaagtcacgaagccctcacactctgatgcccaattcatttgggctcccccgccgcggggtatgatgggaagaaataaccagtgtggagtggcactaagttcctccataaccttactctctatcaatcaagtgtgccttttacccctttgctgaaagaaggagcactatggagagagggaccagaaacaggactcccctcaccatgaaactactgtcccacggctgctgcacagcaaagatgaaggtcggctccaaagctgcataaaacaagtttaatttccaaccagggtcacagtcatcgcgttatcccacattttgagcaaggatagagaaggtgagttattaaacatatacagtctacattccagaggaggaactgcagttaccactataacaccacagacaaactttggggtggggggagcgggagtcctcaggaagcagaaagctggaatcagggaaagcataaaattaaacctaccagagaggagaggagagggagtgggcagaaatggaatgaaacacccaatcccaaaagagctgttaagtgaatgggaatgtagaaaggaccacccctgccaagggcttagcagccagggatactaccaagatcacttactgccccctgctggacagatctggggcagcaccaaggcaacctcctaacatttccagccccagattggtccctggagcccccaaaaaaacaaggtgaggggtgaggcctgaagtgaggaaaacctatttaggactgacatctaactagagaaagtcagggaatgaggcaggagaagaggcaaagtcctcatgaaccacaaagatagagtggaaaatcctaagtaggaaaaaatacatggaaaagggcaaatgagcaacagcagtgaatgagttgagattgaaaaggaaagagttcaaggaaggagaggcaatggggcaagacaaaataaatctgaggaaacagagcaaataaaaagtatggagggaagcatctgtggggccagggaaatgaatacatttttaaatgaaatagaacctccaacaccccccccacaaccaccacacacaaacacacccacacccatatacacacacactcacacacacacacaggcctagagagcaagatacctgcacacacctgctgcatcctgggtaacacatcactaagtaactggcactgagggagatacccctggaacctctctttcacagttcaatcttggatggggttactaatattgatccatctgctatcaacaaaagtggccaggaaacctggccccatggagtggggcttgggacagccctactgggaaggggtccctcagccatgctgtggggggccctgggccctgaccttagcaggttatgggcagctgtctcggagctcagggcgcagccagcacacacaggagcccacaggacagccacgtcttcacagaaactacagaagtcaggacccaggcgaggacctcaggaacaagtgccccctgcagacagagagacgcagtagcaacagcttctgaacaactacataataatgcggggagaatcctgaagaccactgcatcccacaagcactgacaaccacttcaggattttatttcctccactctaacccccagatccatttatgagaagtgagtgaggatggcaggggcatggagggtgaagggacagcaaggatggtctgagggcctggaaacaatagaaaatcttcgtcctttagcatatcctggactagaaaacaagagttggagaagaggggggttgatactaaggtcagctatgtcaccccacttcccagctcctcattagaatacccagtcagccctggtcaggccagtaggagtactagggtgagaaaattctgaccaaggacagatgacc

SEQ ID NO: 96737 - DNA, 14120 bp, Homo sapiens
tctaatttagagaatggcgttaagtcgagataagatgatctgagctgaaagcacggaaatcagtagaccctcactagaggaaaagcaaggcacggggcagagtgggcaaggcacaggcttaaggatcagtagatctggtttgctagcctgtaaatgtagcctcagacaaatctgttaatcttttagcctcagtttcctcatctgtaaaatgggaatatactctacgcctcacatattatgaagattccatgatatctaaggaatgaaatgaattgagctcccagcatagtaccaggtacagtgtggacattctctccataccaacatgctccaccacccacccttcacagtaatgcttttctgagaaaggcaacagaaaaagcataggaaaataaagcaggaaaaagtgattaagtataccctaaagtaatgaaaacgccattcaggccaggtgcggtggctcacacctgtaatcccagcactttgggaggccaaggctggtgcatcacctgaggtcaggagttcaagaccagcctggccaacatggtgaaaccctgtccctactaaaaataaaaaaaattagccaggcatggtgccaggtgcctgcaatcccagctccttgggaggctgaggcaggagaatcgcttgaacccgggaggcaggggtggcagtgagccgagattgccccctgcacttcagcctaggcagcagagtaacactctctcaaaaaaaaaaaaatatatatatatataccatttattgagttaaggattactgagtttcatactctttaagcgttttacaaaaataatcttatttaatctttacaaaaatctgacaaggcaggtacaattatccctactttacataagatgaagaaactaaggctcagaagggttaagtaacttaccgaaactcacagtgacagcgcagtgaaaccaggatttatatccaggcttccaggagtacaaaagcccagactcttaaccacatgctacctgagtcccccaccagaggtggcctctaccctctagctgccatctcactcctgcccaggagctacaagtgcactgcacacatatctgcaatatatgggactgttttatgcctttaacatttacatatacaaatggtattatgccataattacgtgtttgcaacttgctttttgactaaatattgtatttttgagattcagccatgttaaatacatctagatctagttcattttaactacagtttagctttccatcatgtgactaaagtttatttatctggtctgctgctaatagaccaagatcccttcctgtcagtttttcattattgcaagccatgctgcaatgaacgcgccaacacaggtatcctaacacagaggtccccaacctttttggcaccagggactggttttgtggaagacaatttttccacggaccagggaagggtggggatagcttcgggatgaaacggttccacctcacatcatcaggcattagttacattctcgtaaggaacgcacaacctagattcctcacatgtgcagttcacaatagagtttgtgctcctatgagaacctaatgtcgtcactgatgtggcaggaggcggagctcaggcggtaaagctcacttacccaccgcttacctcctgctgtaagtcctcgatccctggcctgggggttggggacccatgtcctaacacacacatgcagaagtcagtctctaggccagggacagataaactatggtcttcaggccaaatccagtctacttcgtaattaaagctgtattttcataaataaagttttattgaaactcagcctgctcattcatctacatattgcccatgactgacttcaggctatataacagcagagttgaatagatgcaacaaaaaccacacagcccacaaagcctgacgtacttagtctctggccctttactagggtaagtttgcagatccccctctctagaatatatacctaggagtcacgcagctgggtcttaggctctgttcacccgtagcttgactgggtactgatagttactcctccaaagtgttggtaccattttatactcccatctgcagcatacatgtgcaccacacaagcacatacacacaacttgttatccaacttttaaggttcaccagcatgacatgtttcactactgtcttcaattccctgatactgaaaaggtggagcgtattttcaaatgcttaataaacattcaacaacaggatatggttatttattcaacaaatcatttgagtccctattctgtcactgttccagatgcaaggactacaatgatgatctaaatcggcagcaaatgtttataatgcctttaaggccgcagagtttgcaatataatgataaataaaagcagtatttatttatttattaaaatgctcactgaaagcttgctttgcataagcggtacacacagcaccacaggcagtggcataagacatattccctcgtctctggagggcaaaatactatgtataaacaagcatggtctcaatgtgttaaaaaaaaaactgttaggaactagatctaaatgttaatacaatagtttccataaattacaggtgattttccttctttaaacttttcagtgttttctacgttgcttccatgagcataagttcctttattaagaccaggattaggaaatgatgatgtcagtctactgggacctgatccctttgtgactgtcttctgtgtgcactccagataaaaagagaaggacaagaaggtcttgagaaggccagaacacaatgctgcctcatagtcacctttgttccttgggtcacagtctcaagatgtgtctgtatcacactcctgggaacccagtactcaaaactaggaaagaatgttttcctccggtttaggcactttgtaaagttcaggtctccttggcataagaaccaacaaaaggccagttttgcaagagctccgttcctattactagaaatgaccttggatctggtgtacaaacatagtttcggctggcaaaagcaagcatcggacagcccgttagttgctcttggtaaataaagctgtatagggaagaggggaagagtcttaataccctggctgaactaatccccatttggggaacgtgcttttaccaccctgcccagtccaaatgttaatacttactaatctttacttttctaatcaataaaagaggtatgttatattcaatatatatgcaacgcgtttattaaccaaaatagcaatctgatgaaactcagtggtcaaggaatgtaagggttaaattcctgtcgctgctgtttgaaaacttaagaaagtaagctcagaaaccagacaccagacgtggataaaagacagaaaaataaaatgttatcagtacatattcgtatttttgctcctactttccgtttactagctatattccagcatatctcatttccagttatattaaacaagagaaaataaattcacaaaccaaagaccctcgaaacatgatactaagcgagataacaacaccacttttttactagtgccatattggcaatttgcaggggactccctgcaaggtctctgtcaaaagactgcaaaatagttactcctcttttaagcagagaagctgtcttcgaaggaagactgcaggtcccttgccttgcacatgataaaactgagcccagtaactggtggcatactagttgacaaggaagacaaaagggtcatgagaataacacatggtaatattacatatacgtggtaatttgaacctgccctctcgactcctcaactcaacatgctttctaggtcccacccaccaccactatcacctacagcaaatggaggatcagttatccccaagagtctttaaggactagataatctgggaaaaaatacatttgaaaaccatcaagtgctaatacgaagccagctaccatttaccgggtgctttctgtgccaggtaaaataatacacactttctataatttttactttggcttcctaacacaaactttgccaaattgtctcattatcctcaaatgcaggtgagtgacttaagttttacacctgattagccacagaagaggatgtcaacccaaagcttttccaaacaccagcctgtctcatcattgtaagcaatgactatgattagtaatttcgaatttagagtaacagagaacctggcacctatttttagcacacaactggcacctctttttagctagggacatgcagggactcagtcactgaaagtctctaactgggatgcaggtatcctaagtcactctctagaaggaaaaggtacagccttcccagttttccaccaaccctgaccatcctggccaaggagcaggcccttgtgcctggcctcttcctcctcccctactcagataagactggcgaatgcacgtggagtacttggaaaagatgcttattagctgcagccttccctctcccggcctaatccatctggcccctggtgccctggccccctgggctccaaggctgagccagtgagttagcccagggcccaggagccagggctgcttcttttccccacaaacctctccaagccctggcccacataaattcagccctgtgcttgagtatctaaagccaaatgtcatgactcttccccgacaacatagatcccgactaaggtcagccgacagctgtcccaaccctttgcttgtagcaaccacagaggatgatgcttgacaccctgagccgtgagccaagcgagatcagcctccgacctcactagcctcaagggcaacctcagccctctccccaccatcgacagccctagaccttacccacgagtaggccaatggcttccaacctccccaaagtgtccgcgaaagtacctatctcacagtgggtccttactatgagtttcctaaccgtgcagagcagtcaggcagcgggccaccctcctccgagtcagtcattgacaaatcgccccgaaacgcctatattagctcgaagtgaggataagtgaacctttaggactttacctactgctcaagttggcaacagtacagagccccagatcctcaagacccagtgaaatcaactacaccctcagcccagactctactccagggcagtactcctcgccctaacccggctcgaaccttcagacagaccccggcggatggagccccgctccccagcccggcgcggcggaacccctcggcctcgtgcagcgatgctcctgggcccggggcggagggcgcctgcccggcacactggcctgaccttgtcggagctccgggtcgtccagcacgttgtaggccgcgtaatcgcggacgccgtgcagccgcaggatctgcaccacggcgttgctgaagccgcactggggctgctccggcgtccccttgaggaagaccaccaccttgtccttcttcaccagcgcgtccaactgctccgccgagccgccgccgcccgcgcccgagcccgccgcccgcacgcccggaccccaaaggccaccgccgcccgcgccgcgcccccagcggagcagagccgccgcagctcggccgagggacccgctcatctccgcacgcaagccggagcccacgacggcccgggcccacagctggccacccagagcgctccccggcccgcggcagtccgacccgccccctggaggccctcattgggccggctctaaactgccctccgtgattggacaatactgatcagtaattactcgattccaccaatcatgttgctcgtcccgcccggcaggtaggaggtgggccttatgccggagcctcatcctactgccttactattggtcgtcggcaaccgctttgttagttaattggagagactggatgtccatcagggtcacgcttgcagggcaacgagaggcaaaacaagagggaagacgactttcctcctgtgagccaatgaggccagctggactacgccgagacaactgggagaggcgcgggactcgcccgttccgcggaacgccgggaaggggtcacctcctgatgaagtttccggttccggtgtcagcggcggttgaattgccatggcaatgcggtgggcgcgcgcttgtcgtgttggtctcttgggaggtagyggggctaggccgggcgggtatccgcctctcccagcttaggtgagcstccccgggcgcctccggagcgccgcggccgcatgcagttcgtcgtggcggggagccggagcctgaccggggttccagcgctcgggccgtagccttggctyctggactttccctggctccgccgccacgtgggagctgaggctctggggcttccgcctccggcgcgcgattatttctctagaacagttttcatttttaaaatttgtaaagcgcttttgcctgtgtgatttcctctgggtttttttttttttcttcctttttgtagagacggaattggcggcgggggcggggggtcgatgtctcacttttttgcccaggctggtctcgaactcctggcttcaagggatcctcctgcctcggcctcttaaagtgctgggattacaggcgtgagccaccgcccccggccgcctctgagtttccagcctcgttggccctccagccttttaacctgttgggcctaggatcaggaaaggtttgttgaatggggaactaagaagtgaattcgttcgttcgacaaacgtttcctgagcagccgctgggtgctaggcgcagtgccagcgcggaatgtccagggagacctggtgcccaaagcttggacccatcgtgagaaatgagaagcagatacaaagcagtgtgggagtgcagaggagacaaagcaagcctcatcaggcccattgcttkctctgctctcccttgtacttaccagtgcttgacaatatacagttatttactagcttggttattgacttcctayccagcactcagttttattcactgctgtatcctcartgcctaggacgatgcttggaacgtggtaagtgctcctattggcgggaagaataaatscggaagagcaggaccagtggacttgctacataatctgtagtcttggagccgcacagggttggtggtaccctcgagcacaccagacttgcagaaaaagcatactccagaggaagctgaggcatgcctgctcgagagccagctgttccatgtgcaattttcctctgatagtttctggtcrctgttgccacggtgataatgactgggctatgtcattatctatccgccaacagtaagagaagctttgcagtcgagatattgtttagcagatggagtgttttctgttgaacactaagtactgccacaagttacttttttttttttaaactttgagtatttttttacaatgttgctggaggtgatctgtttatgctttgagagtgttcgaatttaaaatcagaaaatcatgtcagtgagtgagtctttcaaataatccttcggcatgaaacctgagcctagtaaactatgaaagtaaactcggcacattacccgaaagtctcaatgtcatattttcacccccatcaatattattgatgattgctcattttctaatgtgggacctgaaatttaccaggtgmttaaagaayctttttgtttttcagattcattgattccaggtaaatcagaggaacaagcaacatgaacagaaatatgtagaaaaagctattatgcagaagcataattgttgtttcagaagtccagcatctggtgcacttaacaatagagaatatattaaactctttccaaaataacctgttgttcctacctgtgttgtaagtgttttgtttgtttttaagtaaatattggtgatttgttsccaaaaacctaaactgtttgttgctgtcaacttaaataacgaacagagagaggctctctaaaagaaaatggcatttattcaggaatagagcactgcaatgagaaaatgcatgcgatagttaactgtgtgtatcctgggagatagaggaagacaaaggtctttaaaggaaaaatgaggagggttacataattgttttgagataattatttttgactacaaggatcagtaacaaaggtgacaccagtcccaggttggacaggcaggtgctcggcaggcattgcagaagtattttttgtgtaagattgagatggcctttgtgcaggattgtggttttggaatcttctgtgatcgtttttgctatcaggcatttatgcttgcgaactctttatggccttccctgtgtctattttgattccacctttctcattgcccactctaaactgtaattctgcttttatgttgactgagatcaggagaagaatttgcaaacttatatcctgagacagaacagtaatgaggagtatcgtgttccttacctaatgtataatattgggctcagaagcagttgtcttttttatttgttgaacgttgtattaagttgagaatgcagctgccattaaagattaagagtaatccttgagaaggaagagtacaaagcctgtgttttgctaaatcatagtgaagttgccgtgtttttgtagaatatgataagaacatacagtgtgtgaaatgctaaggatatggaaaagcatgttggtgctctttcaaggagctattttgatagcatgagcaagggcaggaaacagatcatgtatctgaaccaaagaaattgaaacaatacatctaaatttaaatttttaataaaacaacccaaaatatagtgaaatacttagcaccaaacatcagtgatcttaagaagcaaagaaaacagtattcaaaatacttcgtccaaagtatcagacttttgcataaagtttggcattttggttttgagattcctctttagtcctatgatgaaaacatgacaaaatatacatcttaaataaacagttgtcatcagtctgcatctatgaccagatgttttgggtgttttgagtaaatggcctgtcttagcatgtgatggcttcctgcctcgtgaacattagtgaagaggtgagggtgggaagtactcaggaacttctgagaatcctgggatttgagtcacaggattggttaaaccccaaactaaataatcatgccgtgtaaacatgctgactcaggcatcctaaaaatgtttttcttccttgtgtttatttatagataaggctttactatatttggtagaactcctgttttctatccacttctccaaaaacaaattcgccattgaattcatcgtgtaaacctccacatatctgagatagcttcttccgtttatcagccccaaatgaagaactagagttcagattattgaactgaaggtgatgctttatctgagcactccacatgtcagtgtttctgtacctttacttttttaaaaaattattttttaaaaagatgaggtctcagtaggttgcccagactggtctccaacacctggtctcgaatactcctcccgccttgccctcccaaagtgctagggttacaggtgtgagccgccgcactggccctgttcattttatgctcagtgctgcattcttgtttgttcttagaaaatgagagggtgtgtttgcatgagaacgtgtggtacagaagtgtctatctgagctggccagaacattctgcaaatgtcatattaagggcaaaatggctgcttggattgtacaaggggccgaaccaccacgcattcctaagctaaaatagcagattctattgacctgagctggaacctgaaagcttcctctgtgatgcactgagctatcatctagtagttttagagcatcactgcaaccctggaactacctggattccctgataacaccaaaaataatgtaatgtataagaaactgaagcaaaatgcagccctcagaatttttctagtccctattgtggagatagaaatgcttgttggatttcgactacctctatctgacaaggcagctggtttattaatacttctttggccgaggctttgctcatccctgccgcccacatcttggagacaggaaggcaggccagcctccactgtgtcacacaagtcctgctcccttcacctgccctgagtcactgggtcactgaagagaaagggcatgctgtagatctggttagttcagtctagaatagaccgtgggagataggtgagcatttatgaaaagcccagatgccatgacaacccagttttgtcctggaatttgggtggaggtgtagtcctgggttctggtcttaaacgtcgctgagtacttgagttctttttgattttcctcagatttttccacatctattttcccctttctggattttggaaaaatccaaattgatgtctgccgaagtttgtatataattgaagaatttcttcatataaaggctgcagcgttgtaagaaatctgtgtgtactttctctgctcataaatatttacccccaaatgttatcatcttgcatagattgtacttttttgttaaatttttgtgtgtatacatgaattcattcgaagcatacattaaccctaggataacagttctcagacattttggtctccaaattatgtttttttctaatataatatgttgatagacattagcacttgtgtctctaagttttgttgccttcacatgcaatttctgttttcctgctgattcatagcatcaccaacaagtcctgtagaaaatcaactatcccagttatctttgctggctctgcatatatactagatacacagatgatttttgggctttgtaaattaaaatgacaaaagttcaatccagagatctaatagctggacgtggtggctcacatctgtaatcccagcactttggaaggccaaggcgggcagatcacctaaggtcaggagttcaagaccagcctggccaacatggcgaaaccccatctctactaaaaatacaaaaaattagccggacgtggtagcgggcacctgtaatcccagctgcttggagactgaggcaggagaattgctgtaacccaggaggcggaggttgcagtgagctgagatctcgccacttcactgcatactccagcctgggcaacagagcgagactccaactcaaaaaaacagacaaacacacagaaaaccaaaaatctaataaaaaaaaatctaagcctatagcctgctgtttctgaaagctatgttcctcttgtccccacgctgctttctcgcattgagggccaagctcctcagctgcgtgccttgaaagtcatacacctgttggatttcattctgttgcaagccttatttaataacaaggacatgggcctgaatcatatctcccggaaagtggtattgagaattaagtggtaatcgtaaaacttgttaagccttttggttaaaggtgatgaaagaattgtttattttccccaactgcctgtttaatggcagtgttttgtagtattatgtgtttcttttttttttaaccagcagatagtttctataactcaaattattacattccagagacctgaaaaggtccctaggtcgcagaatagaaagagtaaggaggcagtgctgttgtgtatccaacctgttaggaagatttatctgttagcagaagtttatgtctccctctgatagtcactgagtttgcagccagaagaacatttaggaaatttaattgttttcttttgaataattgctaagatgtattgccaaggccataaatacactttatcatgagtcagaatttcactttgtacttcagtctttgagctttaataatttcatgccttcaaaatgcagtcttgctattgtgggaacccattgctccagccttcttcaatcgttcatctaggcctggcgcagtggctcatgcctgtaatcccagcactttgggagaccgaggcgggtggatcacctgaggtcaggagttcgagaccagcctggccaacatggtgaaaccccggctctactaaaaatgcaaaattaggcgagcatggtggtgggtgcctgtagtcctagctacttgggaggctgaggcaggaaaattgcttgagcccaggaggtggaggttgcagtgagtcaagatcgcaccactgcactccagcctgggcgacagagcaagactctgtctcagaaataaacaaataaatagaaaacagttcatctagcaaaaaagaaattcaccccagtttaattgcagggaggggagggatgattcaagttagaaatgggatgaggcattaattattcattttcctttgctggcaaaaaaaaatggaggattttaaatttttttgttctccttttacagccagaaaaatcctatttgctaattctaaacttaatattttttgaaagggtatcctagtgagatattgttcattgatatcaaattttagtgagccacagtttcaaagagttttaataaaagactatcaaaagactgggtgtggtggctcatgcctgtaatcccagcactttgggaggccgaggcagatggatcacctgaggtcaggaatttgagaccagcctggccaacatggtgaaaccccatctctactaaaaatacaaaaaattagccgggcgtggtggcgggtgcctgtaatccaagctactgaggaggctgaggccggagaatcacttgaacccaggaggcagaggttgcagtgagccaagatcacgccattgcactccagcctgggcaacaagagcaaaagttcatcttaaaaaaaaaaaaaaagactatcataaaacaattacattttgtttaaaaaaaaaggagttttttttgcataagctttattacataggcaaaattgggtgacttgaggagaagctgttatattggcaaaccttcttccctctccagatagacggtgatctggcattttcatatcatagctgtatgagtgcagccttgaggggacatgccagtctagtcgatgtgaaatcaatgggatattcccgttggttcatctcttcataccatgcagccacagatccgtgataatccacacatactattggctgtctaattacagagcaaataatatcctcttacttgaaggaatttttacttgtgttcagaaaaataacacatctttcaaagtcattctggttttgagaaatacattttataatagaatgagtctctgtctttcctggcaaggcaggtagggggcactagtctattttactgaggaagctggggcaagagccaataagggctgcccctgtaattatacattctctgggaattaatcattttgctcaattctaggaaaagtctctcagttcttacccaagtgctattcttattttagggaatagctaacttacttagttttctaatataaccacaacagatcagaagcagtaaattttaaaaggctaacactaaaagcagaaagaaacaatgactgaacagtaagtgaaaggtgaagcactaagaggcagacattctgggattcttcttaaaaagcagcattctggggcattcgatgtaaggaggggcgaacagtcttcacccgtgactgttccttgtgcactagtgccttgtattatgcttccgagcaagaaaaagaaattcttttccccatgctctgaataggaagtcaaggaaacatgcagtttattttagcttgccaacaaaaactacacacacacacacacacacacagcttaaggttatgttaaaaaaaggaatactttactccattgtgccagataaagttattctaactctgttacatacttcatgttagtacttggaagacaccttggaaatacctagtacatttcatcaggtgttgagggactgaataatactggtgtaaagttgaatttttctaactgtgtaaaccagtgggcttgataagagagctcagccgacgttacgtcagaaagggccgtccataaagtggttctgcaaatgctgatgtcaacccaggacacacaattagaggcctcaaagaatataaccacctcacttgtgctactacccagccctgtttcacagtggttggggaccagaacctcttcagggagtgtatgcattgtaattgtatctgtttattcctccccccacccccaccacgcacacactaggccatcaacttctagttgggtaggattcatttttgtaacctggtgccctagtgccatccctggcacttactatatgttcaatagataattcttgaataaagaatacataacctggtgaacaatacagagcaggatctcagc

SEQ ID NO: 96738 - DNA, 16223 bp, Homo sapiens
ctcttctctccctatcacttaacaaaccacaagctttagtgtcctcttgctaacaattcctgaagggacctccacgcgccctggagactctatgggaaggggccgccactagaaagggtcagcccatgtgagttcagcctccctttatttctgaagtgcagcctgacaaataacaacaccttatttttcaaacttatgtgagcgtggcagggtgagggttcctaagaaatgaggagtggggagtgcaggtgcagcctgggcccctccccagggcaagcagtgctgagcaacgcggctgtggcttccctgacaatcaggagcttagtttcctgagcagacaccgcacgtggcactcggcacatattatctcaatgaatcctcacaatagccattatcattagctcctcccagtgaggactctggagctcggccaagcaccttgcctagggttgaactcgacacagagcctgtgctgtcatctgacccttactgaagggaagtgttttgatgtccaggtttccacaagctgtctgtcttctgccaggttttctaggaacagagctagcccccggatgtgggtgcaggagactgtggagctgtgccctcaggagaccgggagtgagggaggcagaccggggcggggtggggtggggtgggacccaggtccagaagtggctcagctgcagtctctctgggagcaggaatcacacccgtgggaccagctttggcacctttgcactcagggtgcatgcaaccgcccaggtgagaaaggggcagccgcgggcctcaccagccagtgccccagcagctgggcaaaggtgctctggccctgagaggtggaggcaccacggccccactccactccttaaggctgtgcttggagcaagtcctcctcacctttttggggaatggggccaaaacccagcagaatgtcctcaaattaggaaaggccgtcctctggtgtctattggggcttgctgtgggcagaaacccggctggggtagggaggtgggggtccctgagggaagctatggggggcaggagaggctatgcctgcttcattatctagccactacccccagagctgcatgcccaggttcctgggcctgtcccctgccccattaaccagcttctctttctccaactgcagcacctacatcccggttcctgcaaagatcagagtgaaacaggataaggtgagtggaggccccggcccctctgttctaagttcaggcttcctcatctaaggctctgctctaaggtacggcattgagttgcaagacagcccccagatccccaggccgctggaggtagcatctcccacttagctatccccctgggggaagaggtcaaacactgggagagattctcaaagtggggtcccccgggccagcagcatcacccgggagtttgtcacagatggacatcctcaggcccatctcgaacctactgaatcagaaaccctggctgccccgcattctggttttaacacattctccggggacccctgtgcttgctgcggtttgtgaattactctcaaagccaggctgcacctcctgcttctccatctctttccatgtctccatcttccccagcaggcccctggcatggggctggccaagagatgggcaaagggcagaagaaggagggaagtgaggtacccaccacactggccttttgcatactctatcaaacttagataggctcggagaggtcaggaaacttgcccagagacacacagctagttctggataaggctagaattgaagactccccgtgcctccagcatcttgccctttgcattgggttgtgctgcctcagggaagaagccacttatgtgtctctatagggtggggttggtggaagggacagcctcctagagatggtaggaggccacactgagaggtgaatggtttaccagagacccacagaatccacccttccagtccattcctaggggctggagtttggctttctggacgtgcacgccctctcctgcctgagaattccctttcgttgtgctcaaggcaggctttgggtggtggaatcaaggccaggcctgatatcggcctcctcccagctcagccactgctggctgtgtgacattgggcagatcacttagcctctctgggcttcagttttcttatctgcagcatgaggagagggaaacctgggacatgaggtcattttaaggattggcgatgattccagccatcatcaggtggcttggtgcatatgtcttcactcactgacagtgtccagtcccacctcacactgttccctggagcccccttctcctgagcagcctcccatctcactccctggcctccttggatttttctgtgtgtcagctcagtgatcctcctcacacggtcctgtagggccctcctctgcatcattgctctccatagcacttattagctcagcacctctgtctcttagtgatgtggatgagtgtccatctttcctacgagcatggaagcccacaagtgcaggcgtatctattaggctcatggctgtgcctccatggccacaacagtatgtacatctgacaggcgctccatgtcctttgccccccagaactcactaagggccgtgtcttcccatccccgcagatcctgatctaccacccagccttcatcaagtatgtctttgacaactggctgcaagggcacgggcgatacccatctaccggcatcctctcggtcatcttctcaatgcatgtctgcgatgaggtatgccaccctccccctgcccacagggctgcctcgaagctcaccgtcctgtgttcccaagagaggccagggagggggagggcaggtagacctagcctgcctcttccggaagctcggattccctgtctctacgacaggacttgcaacatgtgtctcccagggtgttttagtgagtaacagtgctctatgagaaagttctcgggagcaatagttctggcacattctgtgtaagtgcccaggaccgtggtggtggaagctcggatctcgcagcagattccggatacagaagcggattctcatagcgagagttgtctaaggccacagttctcaatcccacttgctccttagaatcatctgtgggtctaagttccagcacccaagccacaccttggcccaattttaccagaattaatgggagccaggtacccaggggttccactgtctaccgaggttgagaacccgtgatctcgagaagcatgcatttgccttcccatgtccttcgctgtccgctaggctgtgttcgggtttccacttatgctctgagaggtttgctgccaccccaggaagaggggcaggagggcaggccacacagcccccacttcctccctgatgttgggttcaggcagggccctcacgtgtcccttcttgtctcattcagcccagccccagccccaccctgcctggtgcctggtgggaatctcagaaagggtcagaggcattgcaaggcaggtccccaggctcagccccaccctggtgttcccaggtagaaacatgggtgcccctgtcatttccccaccccacccacctccagccagctggtcccagacccttgcttgaggttctgctcaagagccctttctcccatcgtcccaccgatttggccctaacgttcttgccctggagcaggcccatgtccatgttgcatttcctgagaaagccacatgtggcatggtgctgtccccgtcccctctttgtccccacccctccaatctatcttccacgctgcagcccagatagcacgtcctctccctggaagcccctccatgcaattccttctggtcatcttgtactcattttccaagacccaactcacatgccacctcctctgaagagcttcctctgacctctcagggcatagctcctccctcctctgtgctgcgggagccctgaatttagccccatttccaacaaggaccactcagtcagtgactccaagaagctataagctccaaggctgcttccccctgcagctgcccagctggcatctgatcaagctctgcctgaacttcagtacagccagcagggtgctgggctcagaataaatgcacagggtttgtcatgtatgtgaaaggcctggtctagtggccctgagggcgcctggaccagatgaatgttggccacagagaagaaagggatcagccctgccctctgcctcactgcaatcatgattcttggacccattttccagatgaggaaagtgaggctcaaagaagtgacttcacatgcccagggcaccacggagtggcagagctgggatttggggcagtttgcttggccccaaagccctgctctccttccactctcttccattccacgccctccttcctattccttccctctgtagctcctcaatcctgggagaataggttgcacttgctgcagaggtaagacccgggcccctgagaccacccagatgcagtaatctctcagggtgcttctggaattagacttgagttttacttaacttgcatttgcttcaccaagactctgagagttccaggaacgtagagaagggtttttaatgaagggttagtcagagtccttggaaatgctgtttatggtcctgtgggattccaggaacgcctacaggcttcctttctcagaggtgccaccagcagccctgctgtctggttctcatctttgctttgctcccacaggtggacttgtacggcttcggggcagacagcaaagggaactggcaccactactgggagaacaacccatccgcgggggcttttcgcaagacgggggtgcacgatgcagactttgagtctaacgtgacggccaccttggcctccatcaataaaatccggatcttcaaggggagatgacgcagtgaagggctgaggatggacgcactgtcacacctctgcatttccagccccagcatcttgctggagccgttccatcccggagcttggaggggcagcctcaggtgtgtgcctgggcaccgctcacagcctcttgcacccagccgttggcagcatctactcagcaaggtcactaagctctgccagcgtggcagagcatgtcttggaacctgtcttgagtggggacaacgtccccccactgctgccctagagctggggagacgctgggaaaggttcaacctccacacactaaaatcattttggctcctggggcaagcttggggaatgaatgtggaagatgcctatattctgagagacaggacagtttcccaggaagatgggcagagacttgagtggcgattacctccagcacagagacgtgccaggcggtgttggcgctcggggcgagatgctgcccttctttgcacgaagcctggcctcttgcttggcgtgataaccctgtcatcttcccaaagctcatttatgagccaccagaggctcctaccccaaagattttcacagaaacttgaggccaggtgccgtggctcacacctgtaatctgaacactttgggaggccgaggcgggaggatcacttgagcccaggagttcaagaccagcctgggcaacatagtgagactcctgtctctacaaaaataaaagatttaaaaaaattagccaggcacggtggcacacacttgtagccccagctactagggaggctgaggagggaggatctcttgtgcctaggagttcgaggctgcagtgggctgtgatcacaccactgcactccagcctgggcaacagagtgagaccctgtctctgaaaaaaaaaaaaaaagaaaagaaaaaaaaccccaaacttggcaccgtgtttctgactcctgcagatgcctcttcccaagcagttgttcctttgagtagtcagtctcatggttctaatcgtggcgagagcggatctgaccacttccatgtgcctttgtatttgggaaagaaaagcatgcattggctgaaatgaaacaaaagcccttacttgggaaaagggacccccaccagcggccctgcttgctccgtagctgggaacatcttttctggtttcctgagccagcacctgaattgcaacgaagctctgaggatactcaacaccacccagcagtgcgtcagaatggaacgtacattctcattctcagactgttcaatatggtgcccgtaacctccaaagccacacaggaggctgccagcagcattttccccaagggcctgagctcagggtcaagtccctgctggccatcttggggctgtcactgggggtctgggtcaaggacatcccaggaatggtractgccacatacctcatcttcttactccccagctactctcttttcctcattagccttcctgattatttattgatttcttttttttattcaactgacattgtttgcaccctggctctgttggtggtcctggtgttttaatgaagcttgcctcacccagtagctgggaaattaggtgggggtgcttaagggaggtttgtaggagtcctcggacgtgggatattgggggtatctagggcttggatggtttgtggaatgtcctcagcatcctcycgtcccaacccaaccttccttcttcctcattgtggacttggatttattctcaggctaggagtctccaaaactccgtgaaaccttattgctgctgggtgtggagtggagagtgacaggaatgtgggggacggtgattgttggctccagttactaatgtttaagcagaaaaaccactttcttgttgaaaatatccctgaaaaggtcgctgctgctttgaggaggcgtgactttttcctggtggagtgtgacggaggcatggggcctgtgctcccaggctcgggggagccccctctgcacacggggagggaggaacttggggacatcagtcatgggtcacaggtggcttcaggccattcacaagagtccccggaagttgcgtgccaagtttggttttttccctgaatctctgcatatgagcatttttctggagaaaggaccatagcttttattagattctcaaaggttcagaatggggaatgtgttaaacaaaccgaaaacctgtttcagctttaaaatcctccaaaactttaaagacttttcttttttctgagaaaggctggtaaatcactgagtcatcattcagaacatacagcctcgaagggcagagctcacacccatatatgacgttaagagctcaacaaatgtttgttgagtgactgagtgaccccaggggcagactccagatcatcagacactgatacagagagcgatgctatctcctcaactctccctcttctcctaaaagctgagtctatatagggatgacaggctcaggctgagcagtcgacttctctgggttttgctgtgtaagaayaggtccctcarcatgmagatgtgtctgcgtctgagccagatgctgcctgggtcggttgcctggcctccgtctggtctccctccctcctactagggtggtcaagctgtgagatctcttccagcctccaaatccagctttcccattttactgatgagaaaatcaaggccacattgcagctgggtggggagtggagcgtgacaggcacgggagaggacagcgattgttgactctagttcctgatgtttaatcagaaaaaccacttttcctgtwgagcacatttcctaaaaggctgctgctgtgtagggaggtgtggccttttcctggtgcagtgtgaaggasggaagtgacgggcagtcgtgaactgtctgggacagatagcacaagtcagagtttgagcaaaactagggtgttaccggcgctatgttgaaattgtctggaggcgggctttcccagcgagtctccattcagcatctggaaaaagtgtaaccagaatggaggtgtctgactctcctgtgctctctcagcgccgagctctagctgcaggctgcctgggtggccttctcacaccctcccgtgcaggagactgcatttctctttcccacagcccagcagatagctcattggcttagcaatgggcacttaacagaatccagttgttgcagccagaattaaatgcaccagtytggcttaaaccaactggaactcatccctggggtgaaggtggctgggaattagacaagagtgtgtgttagccaaaaggcacatgcatgctgtcagcaggagaatgaggagcactggttctgggcaggcagtggcaggggctccctcaggcccctgawtcccagcccacagctctttctactctgcagacagagttccttggagactggccctgcattcaggcagggagcagaggggtccctgcctgcagcacccagagctgaacctgaagctacaaagatgggctgatgaggtggcccatgaggtgtcagcaacatcccaaccccctgggtmtccccagtgagtcagggcactgatttgctatagctggagctacatgcacctctcctcccctcagccaccttttaggggagaaaggagggcagatttgtaacctctggttctctgcagggatcctgggctggaagaaagttcataaatggatgaatgccttttaaaactccagcttttccaagcatcattcaccaaagcatttggttaggcttagagagaaaagctggatatgagaaaatagaatgtaaaataggagggraaaaaaaaagaaggtggagagggcagttaagatctgggtgattctttagggaaacggctggttgagaggctttgatggaatcccattctctgctgtggccagaaggtggtgctagaggccagtcccacttggatgtgaccctggcctctgccaggattcaaaccacaaagaacatttggaactggratgtttgctttgaagcagccygaaaacaagtgaaaggaaaccaagataactctctctccctccgctggcaaggatcaaaaataccttgtgcagggaagcccgagcctcgaggggccactgcccagctaaagatgactggacaccagccatgcaccatcaggaaccagcacctgtcctcacccctgagaagagccccgggggtatcattatatccatcgcagacatctggtttgcagcaaatgtggctacacgccatcaggattatcctgccctgtggactgggctagctagttttgagatagagtcaacctccccatttttgtttgtcatgaaaacaccagctcctgcacccctggggtgctacctgacacctgtgcaaagaaaaggaggaaaacttagaagaaaaggcagagacaggcaagacagcatctcacagcttgtcaggatcagggcattaccgactattttttcttaccaaaagagcactgaatttcctaggggaaggtgagccacctttacacctcctgtcctccctcccagcccgtcaagcgatcccatcacccagcctcatcactcagcttcttcctagtacaaaactgccatcggttgtacgtcctgagctgtgggacgtcagctttaaccctagcctgtstcagggcctcgccctccagccccccgccccttagggtgatcrtgggtttcttcccttcctcctgcacaatcgcttcccttcactgaattcccttcaaagccaaagtttcttgagcactttttcttgtgtgcagtcttgtgtgtttgggtgttggtgttttwaaatttgctttctattcccccctgcctctctccatgtcgttacgcagctgagcactggttgggatgcattcgaatgacttcagcaagatcctgctttcctcagcccccgctctgttttatttattgkttaatatttccaatgatccaaatcaaagtgaataaacaaagagctattttattgtttgggtgtgtttgttgcttttctacaagggtcatgcatttgcgcctccttcaacactccaactcagagggcctcctgggttggcgtcgccactaccgaatggccagaattcaggatacagaggagagccccagcgtaggccttggagaggcctcttctcaagcccaggagtcccattacctgccgtgtgactggcgagtcacctaagttctctgaacctcagctgcgtgtctcatgtattaaatgggcgcgacaacactggccttcagaggggatgtgggagtaaaaacaaaagcatctccagaggcccagtrgacatgcaccacctgcttgaacgtttgctgagtgaattcaccttggccagggcctgattgggctgggctagtgtctgtcctcccccgacagagacgggcacacccagggatggacaagagtttggtccaaagttggcactaatctccctttaaaaaaaaaaaaaaacagattcagaaacccaatgttgcgagcctgtaagataaaattggtatacacagtaaccaggcctcccagtttgtatggcacacaatacctccatgggcgtgatctttaactcagaacagccctgcgggctgctgcatggctgagggcggaggtgggttcacagccaggcgcctctctccagtcccgggcctcctgtctgccctgccgcctccctgtcactctgtgcttagcaaagacgttgagttatttgagacactgtctatggggaccttctgagggcagcccccagaggaaggatggggcagagattcacacaggggctctggagccaggccgccctgggtcctacctattagctgtgtgagtccgagcaagttacttaacctcgctgcctaatctcctgatggataagtttggaatgatataatacctctatataaatacacatagaggataaaatgagttaacacacgcaaaaggcttacaacaacaaatgttagttattagtacatcagacacgggagaggagaaggagctgtgtgcaagactgaaatgaacagcaaggctctgtcggggagcccggtctgtttccctccccccatgcctctgtcctgctcctgccccctgccacgggccttcatgttgcccgtgtatctttaagttgtttcttcaactctagagttccctttcctccttgccctatcacttctctgtcctctccctacagggccctgccgtcatctggcgctaacacgcgctcccacccagccatccgttctataggagacacagcctcccccaaattcgctcctggttggcctcacatcacagctgcaatgtggaccagcggccacgaggtggtgctatgctgcagtcggccccgccgcccgcttttccaggccagctctgtagggctccagcgcctggccgccctgtcctgcacatcgcaccctggtctcaggctagagcccatggccagggaaagaaattgtcagggccctccttggacagccctgagggcctaaaggcattcctccaagacaccccggcacctgcctggaagctgggaccagagccaaggcccatctgcttctgcacccccccgacccctccccaaaatgcagatcctcccaggatttggcctgggaacgctgggaagtcctaggaataaccgcgaggctgctccaaacacatgcttggccgtcaacaaaaagcgaagggactaaaaagaagttcctaagtggaactttccgatttcctcttcgctttcccaggatatttaatgtgcacagggattgaaaggagagtgtggcgaccctgttgggtcattctctacattcagccatggctggtgtttcccacccatgccccctcgtttttcttttctttcttttcttttgtcgatggcccacagtgaccaggggtgaccctcagaggctgccactttgcccctgactgtgagtgagcaccttccaggggcagccgtcctgcctgaccacagtgtcacctagcagggtagggggtgggggtggccctgtcctccaatgtccagtcataggagcctccccgcttgtcctcccaatgcctctggcaggtggtttattcacacaggattcactgaatgtctgcatgccacaaaaggaaattgtctgtgtgccctcagagtctcctcccctactaggggacagaggctatctgaggcatgtccaggaagctgatgccctaggggacctggagaggaaatatctatgattctccaggccttcctcgcctgctggggaagagccagcctctgctgtttccattgcttcattcaaggattctgggggtcattttcaaacacctgtgggatattaccctgatgacattccctatagcaatgatggtaacaatgtatctatctgccctgccccctccctccctctgatgcctgtgctgggcccaaccattcctggagaacaaggtgaagcttcatccacgtgtcagagtcaaagctctcctggtcattttcagctgaaacttgaggtcctcatagttcagcaaattccaggttacctgcttctcagagatgcagctgttacgtgcccgtatccccccaatatcttgcaagtgcttgactccagtcctactgctagagactgaattgtgccacccccacccatgcatatgttgaaaccctaagaccctgttggggtggtatttggagatggggcctttgggaggtaattaaggtttgatgaagtgactgggggctcttatgatcaggttagtgccctagaagagaccccagagacttctttaccatgtgaggctgcagtgaaaggcagccatcagcagccaggaggaggggcctcacgagaaccccaccacgctggctccctgatcccagatttccaacctccagaactgtgagaaaatacatttctatttaaatcagtgatctatggtatttttttaatggtagcctaagctgactcacatgcccacactaacactgccaccatttcacagggtaagggacctcaggcaggcaagggacttggcctctttgagcctcagtttcccccctcaaaatatagaagtaataataacacctgccctgaaaggttgctgtaaggggtagactaatgacccatgtctgccaagcaggggacatggagtagcgggctgcagatggtggtcgaggagggagcttggtgcagggaaccattttctccctctccccagccctaagccccccgaatacggcagctctgccctcctctgattcccttggacctgcacctcctgcaggtggaaaagactcagctgactgatcagaccctggggccctcagctcagtcacctctcagctcagctgtgaaaagcagaggcttcctgttttctgggcccccacgtggctccatgtggctcaccttccaggctgatggggctgccgcaaagaggaggttgtgtttgggtatagaaagtcagttcaactggatgagataacgagcagggacattttgctgcaattctaagccacatgccccaattcagcttgactcagaacacagctgcaggtggttcctgaatcaatccctccattagctcagagcccatactgagggtaatgggattgaggccctaagaccccacccacttggagacagaaatctgggcctcatcaggctatagatcacgaagccctgggtctgcatgtggcctgcagggagttgaatgagatggtccaaggagcaaaatacaggaaaggaggttagaagaagcagccagggaggccacaggtctctggcttcgtggtgcctctgaggctatagcaaggtcacttcaaggagactgaggccttgccctggtgacgcctgtccccagagaggtgaaggggcaccatgtatggcctgggtaagagcaagctctctttgggatggaggtggaaactaggctggaatagagtaatagctacaaagacccatgtataaggagtgagtagggcactccagcagtgtaccaggagagaaacagggaagggccatgaggggtgggtgcagggttaaaggagaaggtcacatatttgaggaaggatgctttgtctagcagcagagactgcagcagacttaaatgctgtccagaaggagccagtagagagaggaagatgcagcagagagaaggaggagtgtggagcagggccctcgagagggaaggggcttggagggacccccgcctccatcacaagaggatggtgaggggccggggtggggatccaggcaggggcagacagctttagcggcacgaagctgaggtcattgccgtctgatagcttccttttcccctagagttggggagataaaatgctgagctgaggcgaaggcaggaggagagaacaatggaggaacgttttcccatggactgtgaaccgtcggagaaaatgactgtgagtacaggcagctggtggctagggtggagggccgggttgaagttagagaggatgcgttagagggcgccatgactgggtcatggacacccatggacagtcacaggccccagcagtcaaagaccggggtccacggatagaccctctctgcaaaccgggaacagtgattccgggggtgtctgcctcacaggactgtgataagcgaatgtgctttatgtatatatttcacttggcaaatacgcactgagggccatggggactagagatacagagatgggcaagagaaggtctctgccaccagagtgtgagagttagtggggggacgggcgggcagccagacagctgcaacacccatgaaataaaggagcttttaatgaccgcggctggttccttttcacacgctggcaacgggggctgagtgctttacctccattaagctcgtttaatcctgcaacaatcctgccaagaggcattggtctctcgagaggggaatttaaagaggaaactgagcttcactcaaggaggttaagtgacttaccagggggttagggatgtagccagaacttaaatcgcaagggctggggttcctgagtcccgggtaaagattgcaagtgcgccatactccccaggggtgtggggacaggggacggtgttgctccagagaaaagcactttgaagatgagtgcccatggctggctcacggcgacagagctggtccggcccaacggccaggtttattcattaggaccttggccaagagcgcctggtgatggtggccaccagagggcgcaacggacccaccttccaccagattcaacatggggtttggttgggaaccagacacaagctgaaaacctcaagggaaaagccacacacccacgtgtaaggccagaacttaaaagaacttgatcttagatagtaacaaggacaacaccttccagatgaggagattatatctctgtcatccagctaacaaaatagattgagaagaagtctgtgtccagttggaaaatgtcaaagccccaagcaagggtgagtgtctgaccagctgcccacggcttcacagggccacgtggcaccaccggctcctgcctgcccagacctccacaccttggtgtttctacttggcctccctctcccacccttcatccttgactctgcagtgatttcttagctgtgtgaccaatggggaaaacctgacttctttgaacctcagtttcttaatctataaaatgggtataaggtgacatagtatatattaaggaaagacggcaggcagacttttctgagtcctttctgtgtgccaagcatttcacacgcattttctcctttaattctcacaacaacccccatgaatgacatgggggtggtatcctcatggaagatctgaggcacagagactattagttatgtgtctgtagccacagttcataactgatcaaccagggttaaaaaccaggtctgattctgtctcagtcaggacagaagaggctgctgctacaatactgacaaactccacaatcccaacaacctaagatggaacaacaaaggtttcttcactgccgggtcaaagtctgatggaaattgcagtgtcctacgtgagccctgcatgtggcggctcaggctacccagctgttttcatcttgggacattgccaacttcaacttcagcatgtgcctttcaaggtcactgcacaaggggagaaggagataaaggtggcttgttggctcctaactctccccatggagtcgatacccatcgctttcaatcaagctctggagccaaaaccagctacattgtccaatcaaagctgtaagaaaactggaaggtgccttggagcctccggaacagtggaggggcactaaccagctccctcatgcctctcctcgatatcacaggcctggacttggagccgactggtgagaggctcctggtgctgcccttgtcagtgctgagcgaacacaggccgagtgctccattctgcaggctcagtgggacagaccaaggcagaccctcggcagggactccaggggacaggagtgctgcaggctcagtg

SEQ ID NO: 96739 - DNA, 15468 bp, Homo sapiens
gtaatgtcatctttgtcatttatgattgtacttatttggctcttctctttttttctttgtttagctatcaggctatccatcttgtttattttttgaaaaactaattattggtttcattgatcttttgtgtggatttttgcatctagtctaaaaaaaacagcacttcaaaaagcacttcattcagtgcttctctaattttagttatttctcttctgccagctttggagttagtttattctttttttctagttcccttaagtgcaaagtaggaaagttaatttgagatatttctaacttcttgatgaaggcatttcgtgtgtaaactttcctcttaacactgccttagctgcatcccagagattctggtatgttgtgtccctattttcattaattgcaaagaatttttttatttctgccttaatttagattttcacccaggagttattcaggagcaaattatgtaattaccatgtatttatgtagttttgagagatcttcttgatactgatttctatttttgtctcactgtggtcagagtgtgtgcttggtatgatttcaaactttttgaatttattgaggcttgctttatggccaagcatgtgcttgatcttagaatatgttctgtgtgcacataagaatgtatcttctgtgtttgttgggcaaagtgttctgtagatgtctatcaggtccaattggtcaactgtcaagtgcgagtacagagtttgttagttttctgcctcaatgatctgtctattgctgtcagtgggttgttgaagtctcctgctgttattgtgtgtctaaatctttttgtaggccaagaaaaacttgttttatgaatttgggtgctccaatgttgggtgtgtacatatttaggctaggtcttctggttgaattgtgtcctttatcattctataaggaatgctcttctttgtccttaatttttattcgttaaaaatatgttttatttggccaggcgcagtggctcatgcctgtaatcccagcactttgggaggccgaggcgggtggatcacgaggtcaggagttcgaggccagcctgaccaacatggtgaaaccctgtctgtactaaaaatacaaaaattagccaggtgtggtagagcacccctgtaatcccacttactcgggaggctgaggcaggagaattgcttgaacccaggaagcagaggttgcagtgagccgagactgcaccactgcacttcagactggcaagagactgagactccatattaaaaaaaaaaaaatcaaccacttagaatagtaacacacattaagcagatcatacatctagaatgggttaagcaaccatttgtaagcatcttcataagaaatgatcacctctgggtttttctggtaatatttgaaataaacatggaaccaaactgtatttccctcagcacataactgtccaaattgcatgtgcaagtagaggtttatgtaaaagccctgacagaactgtactcagtcttttgaattagatgcataaggctactgaccactctctattttaccaagggaaagagcagtgacttctctatttcagtacaattatgggcagaaatgacatgatgcaaaatagaggttcttccatacaatttaagatgtagggtataagggaagacgaaaaagcaaaattcccaagaaatcagaataacttcacactggtcttgtactacaagaaaccctgagatgaactgtagtcctcaaacacctgtgcttggctcaggccctccaagacacttcagtgtgcttccaactggctcataatcaacttcctggtatattcgtaggccaaaaagagtgctccattgtcagggaatgctcgaatcatagtaggtttcagtccagaatataaggccattattcctagaagacaaaagggcaagtaaagactgcaacagtccctcctttggggacacccacacaactgcatagcacaggtatatttacacatgcaaatccagacaagtgtgctaaaaaccaacaagtcatggaaggacgcattcccagctttccctaaatagaccaacagaaacaaggacaagtatcaggtctcctggcgaaactgactgatgctcaggtaacataccccaattccatgcttggttaactcttagtacacggatgggtcagcgttgaggcctgagatggccagacagatgcaaccatggagacagaggtggccacagctttgcagcttcacctgggcagtggcaagagcaccaaccttgaggttggagactggtttataatattagtactgcccagggtggttatgaagattgaattagataagggaggtataagtactttgtaaaacttcacgttatacaaatttaagggaggattactatgagtaatagacaagttatctgtgctctatttgggacacaaagttgctgtgttactgttctctttccttttacaatcaaaacagagcagttcacatctcagattttaagatgtatactagatgctggaaaaacaggtgtttattcaccttcatttttcacaacatttataaaggttctgataaatcctgccggttttccagacatggaaagaacttgaattctggatttgatacaatccactggatataccgcaagccataggcaaatcccgccaactccctccaccacttaacatcaaagggacagggcctagagaaaaaaaaaatagcaaatggtattttatctcaagaacagctgatgtgacatttccagaggtcaatgtagtaatggctgcaggtaggtgcaaatagaaatgctaatgctgcggaagagttctttgtggaaactgtcaaagctcttgttcccaggctctaagaacacaaggttttgtttggtagcccaggtctacgcctgggtcttgccaagtacaagaagctctagtgagggttgtattttgtttggtcactgaggtgtcgagggctggcccacatgaaccagcaggcctccagctgagtggcaaccccttacggtggggagaagacaggccaaacacaatctacgtctttttttcttttttcaactttctcattcttaagcattttaatagccccgattcttcctttaccatgtttttattaaacatagcagttaagtctgggagcttgtctaatcccagaatagattcaaaatgctgagggagatggtaagaacaggtaaatgcatttgcattcacagcagtggggtgtgatggtgtttgctccctgcaggtatggtttctgtggattctctgctctttgtgctctcctccccacattggtggctccacctggcacagggaagcttctggattccagaaggtaacatgttggcaggcagttgatagcaccccaccctccaggcttgataatttccttaggacaggggctgaagcagtacatcccaaactttcttactggaataaggtttgttaatttttctagatctattttagaagagaagaaattcagaaatgactttcccagttggggaatcacctataaataatcttgaaaaagcttaaaacttggtaatctcagtagcgttttgagagtagcgaaaaccatagttctttgtagcttatcatgtttagttggttggtaccactgcatgcgatgtttgcctcacataagtgagtttttcttccctgattttgtcctttgctaaggaaactgaactgaactgaagtccaggtcttctgtaatagagtgtctctccttcaacagggaacaacactacagtcgcccgtagttttgtttctgttcagtctccattgtggcatgccacactctcctggtttgggccctgctcatttctttactgccttcctgcctgccctttttgtgcaggtaggtcatcccattcatgctcagccctcctcgctgtctacactgtcttcttgggcaatcgtatccagtcccaagccttttaaaaaaacaagctatacccatcctggtggaattcctgcctataaaagggcgcaccttcagacctccaggcatgtccagcgaacactgctatgcacacggaaccaaattcagttgtgtgggacctgcagctgcaattgggtttccaacttccattgctgatgatcaagttaaaatacgaatgtgctggattaaatgctttattcagcttatctgcatctaggttatctaaattacacacccacttaaaacattctgtcacctcttctcttggaataattaattattttaatgtaattcagatctcattttatcctagcccagcagtacctgggagagaatgactcaatcatagtaaaatcatattaaattatattccactgattcagaattggagataatctggcaattaaagtgagaagtgtgtcattcctctcctggaagaaatgaacagtaatgatgggatcacagagatcatacatataagggcccaatacaggttcaaaacatgcccatcggcaactgccttacatacctggctcccaaccatactgttacaatttctatctttcaaactcactgtaaattacaaatgtggtacccaaatacctgtatgcacataaatatgaaaaggtaaactcttttttttttttttttttttaggtggattcttgctctgtcacccaggctggagcgtaatggcacaatcttcgctcacttcaacctctgccttctgggttcgagcaattctcctgcctcagcctcctgagtaactgggattacaggcgtgtaccaccacatctggctaatttttgtatttttagtagggacggtgttttaccatattggccaggctggtcttgagctcctgaactcaagtgatccactcgcctcagcctcccaaagtgctgagattacaggcttgagcaaccttgcccagccaaaagtaaactttttaattccatcacaatatgttctagatctttgacagactgaaagacatagaatgtcaaaaggtgagactctctcatgtggctaaacaccctcctactgcagatacagaactgagcccaagagcattcacatgctggtgagaggtggtggccaggggcaggcagatggttgcaccactctcagggtcagcatcctccccagtgtggcatgggggaggggaggggagggggcacggggcctgggaggctgtagcctaaaggcacgcagcgggcaagagactactgggcggacccctgccagccttcagttccatgagcgtctggtgccaggacgctccttgtgggctctgccctgggagaagtgcccttgcccagtgctccttctcggtgtctgtgacgtgctgtctccagtcctcctcattagcataccttggccgacctttggctcatggaaaaacactttgctcttctcggaacaatttctttttcacaactgagcaaatgactgatgaggtgaccacactcatgaccatactcatctgttggtggtgggtggggggtggactggatgaggacagcattgggcaacactctttctggcctccccactgcagggagccacaattactgtgggaggccagggtagtccagggtttccctttgggccatcagcattccaactgctcctcctacttctggcctctggagaactaaattaccaccatgcacttcccattccacctgtgcctcagcccgagggtcctgctcttcctgcatattcaagctgatctttctagggagtagcctgcactgtgccagcactacccccttgtcacaggcagcacctccctgtgctgggggagcctcagtctgcccttgggctcaggcccctaggctcaggttagctgacattcccaggaaatcctacaacttctcctttcctttcatggctgtaagacacagtccactatcagtctcattgtaaaagacatttctaaagagtgtcctcctttctttcccaacactagcagggacagtaagtgatgtttcctgggagatgctatggtgttatttttgcactacaagggctctgaagactgccaggcttgaaatgaagaacgatgtcacctgcctatcacagccaggtgacaatggacaaggggcttcacctctgagctgttttccagctgcactgggcacattccycccctcaccctgactcacaaggtgttagcaataatggacacttctctaccttctgccacactctgaacaatgccacacttccatcaaatggattcatcccaaaggtaaagcccatcacttctagagggagaaaggyaatgttttcmtaccactttyatttgatctcatttagaaggtacttgaggaatagagaagactgggttttctctgggattatacttaggcatttcttaaygactgggacatgttctgaaaaatctgtcattacacaatttcatcattgtgctatcatagagcatacacacccgaccctagatggcatagcctactccacacctaggctgtacagtatggcctgttgctcaagkctacacacctgtacagcatgttactgyactggatactgtaggcaactgtaacacagtggtatttgtgtatctaaacgtatataaacacagaaaaggtatagtaaaagatggtataatttcatgggaccaccatccratacaccatccatcaccaacagaaacatggttatgaggcacaggactgtaactgcagcccctgccatgaggtcaatggcagcctggatagggggattggacttcatgtttgcccactcttctggtctcatggaaggcagctctctggagcttatgacaggcaccacatatccctggggggaggcaagagttcaccattagtccaagtctgcagcctcccattctctaggcctgcagccaaattactggacctaaacttctgggagccatgaactgggctctacattgttccaaaggaaaggggctcaaggaatcagtgcagcttagcaattgtcccttagaaagctcacagatcaaaaacctcccctgcgtatcaattctacagccaccagcagcacttcaactgacctttctgaaaactgaaaaaatgaacaccaaataagtcaaccacagatgtactaacccacatcaggcttgcttttttagaggcctgcgytgagccatcaactgaacaggctcacttctaaatcagaaagcagcctgtgctgcgtgcctaagggaacgtcacaagacagtaggtctggaaagaagcacccaggcagccaagggtgggagctgcaccccaggatcacaaacgccttggtgaatgcctgctctacctgcagtgtggcccctttggcctctacagctggaagtcttcatctgtacaaagtgaataataaaaatattataaaacaaaggcagtcacaaatagccacattggtgttgaggtgatcaaacccaacaccaggccatgggggctacaaagtccggcagagtcaaaggaatgagacaagctaatagtacacaaagtgggtccagggggccaatgctagtatagaggctgtgaaggccctgaactctgggagcccacaccatttattggagattaaacaaagaagcaggtggtgaggacgtgctggtcaaaaggaagcagtcacatcaagtgtttagtttayagctgtgtcggtctagcattttctttgaagcatatggaacatgttctgctactcragataatgaacatttccttctrcctcaaggtacaatcagtttatgatcctgggagagcaagaagcaaggagccagcaagtctggacacattccagaggccacgaggggttttatgtcctgagtcctggattccatccaakccatgaggggttttatgccctaggcttaggttgtagtgcggcggggcagccttccacccttaagcacagaacctggtgttccataggccacaagaagttttaaactctggrcccaggacatgttccaaggctcttttcatattatgtcagactagcaagtcttgcctcagcttttctcccaacaattggactgatgggttgctccactgggcacaagcatcatgggttcttaaaacaaggccctgaacaagcaccaaatatgttcctgtcaccacactccactagcccttcaactataaacatgcataggagtcacctgggggccttgctaaataaaatgcagcttctgattcaatagtctcaaacaggaccagagattctgcgtctcttgttgagttcccgagtgaggcagacaatgccagtccacagactcacattttgagatacagcacctgggccattgtgttccaatgtgcttgataacctggagcacctattaaatatccaagttgccaggactttcttctggaaatcttaattcagtatgttttgtttggagccttggacgtttgggaaaactagaatttctttctctccctttagacaaaagtcaactactgctgaggcatgggcttaataaatgttgactaaaatatccaactcaacaaccaatcctgtataattttcaaactctgtcaataacttgctgggtccaacctgcagaccctggctgcgtgatggatgaagaaatgcactcagacacaggtatcctgtgaaagaatggggtaggggactgggcagctcccagacactgaggagggtgctatraagagtcagcaggtgctataaagagtcrgcaggcacagccctgtcaggctggggctccaggcatttattcagtacagatttaatgacaaagttctcaagtaaacaccacaccactagagggtaattaacattgctgacctcctgagtagagagcagtcatgcgcccgcaaatgatcaaaggtctgttttaggaccacatgagtaaacaagctatttagataaacttctctacrttcctatgtatctacgccctaagcttttaagagaattcagctgccttcagccaaatcttttactgaaggtatgcaaacctcccagccttccaagaagttttgtgtctatctcctacaacttaatttttataatttctcccaccaccctgacagatcccctacaaaagaccatgtttcttctcagcttgctcagtccagctgagccagctttccactggactccygaatgtgagaaggacacaggctcccaggaccatccagaagcatctctcatcaccttaaagctctgaaacactggctgggtgcagaggctcacacaagtaatcccaacacattaagaggctgaggtgggaggattgcttgaggccaggaattcaagaccagcctaggcagcatagcaagaccccatctctacaaaaagtacaccccaaaattacctgggtgtggtggcacatgcctatagtctcaattaggaggctgaggtgggactattctttgatcccaggagtttgaggctgcagtggggtatgatcgcaccaccgcactccagcctgggagacagattgagaccatctctaaaacaacaacaggccaggtgctgtggcttatgcctgtaatcccagcaatttgggaggccgaggcaggtggatcacctgagatcaggagttcgagaccagcctgggcaacctggtgaaatcctgtctctactaaaaatacaaaaatttagcagggcatggtggcacacacctgtaatcccagctactcgggaggccgaggcaggagcattgcttgtacccaggaggcagagattgcagtgagctgagatcacgccattgcactccagtctgagcaacaagagcaaaacttcgtctcaaaaaaataaaaaattaaaaaataacaaaaaatgagacagaaaacaaatattttgtttcattattgcttgttagttgattaaagtaattctgcttccactttattttcaaagacactaattgctacactgaataaaaccttaatggagtttcattataagtatctattatcatttgattattttctacatagaagcatgcaaaaagtttaaaattcagtttcatttgacttagtcttgactgtaatgaaggactctacgaagaggggacacagtgtttatgagctggagtcctagtaactgcttggtggcagagtcccagtcattccccagttcaagccatgggcagatagatgggtactgtccttcagttcttcttacccattcacttgctttctttattgcttcaaaagcccagggaatattcttaggttaaaaaaaaataaatgtttcagatttcagaatataacatgtgaaatgtaatgtggtactaaacccatcacattatatcacacaaaatgattctgccaaaagttaagatatttaataaaagcagttttccttgacatcttccggaagttcttctaaccatctgaacttgagcttatgcactgcattgtcaagtgtcctgtgccccccacctcctggcttccacgtgcctccaggcatccctgctgcctacaggacagctcaggttccagcctctctacagttgtttgtggttgtcccctttccaagcttctcagtctaaatcctatccattcttcatgcacaaactcaagtagtatttcacaaacgaggcttctgtttctctctccttcccactgtactgacttgattaggtcccttcagaatatctgacagtcccccatgaaactggcatctgttcagctgtgtcacataaaccaggaacaacttggtagaataagcttatcgagtcaagtgtgtgtccactgaatggtgtcaaatatttgagactgttgaatattcaagtctattcaacactcagaaaaattctggggttgttcattaatattaattagctacttcctcatttgttctgtcatctgttagaacttgttagtgaacaagtggcaacatacaccaaagttcttcagaaaattctatgggaaaacctaatattttgaaaattctctccctgttcctcatttctccctgtgaactgggaaagggccatcagtatagcatgatggtgaagagctgggtttgagtcctgactctgcaatcacatgatactggccatgtgatactgtgtggctttcattcaacactgggaatctcagtttcctcaattgtgagaataacatgaggtcccatgggtttgtggtggaaatcaacaaagcttataaatttaacgtgcatactaatccctggtacacagtgggcactcaataaatgttcactgaatgtcatgatagaatgaacatactaaataagaaccatgcccgaagtttaaaagaccgacatttcctggtaaatgttcgtctactgacagttactgactgctgaaaacaacaaaactggctttgaatattttcactaattcagccggcctcctttagccctgtggcctctacactttttggttcacattccactagtaagaaaaccttgtgcctacacccccaggtaatgtactcctgcatcaatgttacgtacatcccgaaatagaaaatacagaaaaaagtttcaaacatgcaataaacaggaaataaaaaatatttaatttttttttttttgagacaagagtctcgctttgttgccaggctggagtgcaggagcacaatctcagctcactgcaagcttgtgatccgcccgcctcagccttccaaagtgctgggattataggcgtgagccaccgcgcctggcctaacatcgtattgtcttatgtactcaagtgccagcaaaccattttgctagcaccatagcagtaatgtagtaagagctatatgctgcaatatacttgatcagttctgaacatcttgctttaatactttgtggtattacagttcaaaagcacgttcaaagtttatacttgttctaacagctataatattactaattaggaacaatataaatagaataattacctctttggatgtgcctattaagtcaaatactaattttttagtcccatctcctagctgttcaaagtgttttttctttgatatttatttaattaattctcttggcaagtggcactggtttattttcacttgaggccaggagtttgagaccagcctggccaccatggcgaaacctcatctctactaaaaatataaaaattagctgggcacggtggtgcgcacctgtaatcccagctacttggaaggctgaggcacgagaattgctgatcttaaactcctggacttggtcttgctgggctcaagtgatcaacctgggaggcagaggttgcagtgagccgagattatgccactgcactccagcctgggcaacagaatgagaccctgcctcagtaaataaataaataaataaataaataaataaataaataaataaatacaaaaaaaaaagaaaaccccccaaatagaaaaaagaataaattctcatctttcttggcaaactaatgagaaggtattgcttttcaaaaaatggaagtataaattacatatagtaaattatgattcttttttttttttagacagggtctagctttgttgccccggctggagtgcagtggcatgatcacaactcactgcagccttggcctcctgggctcaagcaatccccccccctcccccagcttcttgagtagtcacacactacaacactcaggtaattcttaatttttttgtagagacagggtcttgctatgtggtcaaggctggtcttgaactcctggaagcaagcaatcctcctgccttggcctcccaaagtgctgggattccaggtgtgagccactgtgcccagcaatgcctgggtaatttaaaaaagtttttttgtagagatgggggtctcattggttacctaggctggtcttaaactcctgggcttgatcttgctgggctcaactggtcctcctgtctcagcctcccaaagtgcatggattacaggcatgagccaatgtgcctagtccagaaattcctgaacacctgttttgtgttcaagaactttttcttaatcgttacacttaaaaaatagttatcaggccaggcgcagtggctcatgcctgtaatcctggcactttgggaggccgaggcgagcggatcacgaggtcaggcgatcgagaccatcctggctaacacggtgaaaccccgtctctactaaaaatataaaaaaattaggcatggtggcgggtgcctgtagtcccggctacttgggaggctaaggcaggagaatggtgtgaacccgggaggcagagcttgcagtgagccaaaactgcaccactgcactccagcctgggtatcaaagcgagactccatctcaaaaaaaaaaaaatagttatcaatatttctttaaatatcataaaatatccaggtagtgttttaattttccctgtctcattttttaaaatgcagtgggttttgttcaaactaggatctaaacaaggtctactcttgcttttggttgacatgtctctaaaggtttatttataggttcgctcctcaaccctttttttctcttgccatttatttccccacattccagactttgctgactgcatttgcatggtgtcacataacatgttcctctaatctaattcaagtttagaaatcaagggttttcatttaacttgtttgattttatacatattagtttctaacaatattagtatctaccttccaaaataacaaatcaaaagtgttattaacaccatggctactcccagtgagatttctttgtaatattttttaatccttaggcactatcccactaggggatttgacataatttgacacagtcaaattatttactatgttttaaagtcatcttaaattaattcccaggctgggcatggtggctcacgtctgtaatcctagcactttgggaggctgaggcaggaggattgcttgagttcaggagttcgagaccagcctgggtaacatggtgaagccctgtctttacaaaaaatacaaaaattagcagggcatggtggtgcatgcctgtagtcccagttacttaggaggccgaggtgggaggatggcttgagcccaggaggcggaggttgcagtgagctgagattgcaccactgcactccagcctgggtgatacagccagactttgtctcaacaaataaataaatatcaatcttatccattattacataaaatatttacatagttccaaagtcaaaactgcaaaacaaatcacactaggagaaacctagcttccatccttgtcctctctaccaaacctcccttgcaacagtatttttattagtttgattagttttccccttatcttgcctttaaatgaacataagccaattacatgtgtatgtatatgtgtatatgtgtatgtatgtgcatatgtgtatgtatatatatatctacgtgtatgtatgtatgtgcatatgtgtatgtatatacttatatatacatgtgtatgtatgtgcatgtgtgtatatacttatacatacatgtgtatatgtgtatgcatgtgcatatgtgtatgtgtatgcatgtgcatatgtgtatgtgtatgtgtatgcatgtgcatgtgtatgtatatgtgtatgtgcatatgtgtatgtatatatctacatgtgtatgtatgtgcatgtgtatgtatatagttatgtatacatgtgtatgtgtgtatgtatgtgcatatgtgtatgtatatacttatatatatgtgtgtatatgtgtatgcatgtgcacatgtatgtgtatgcatgtatgtgtatgcatgtgcatatgtgtatgtatatgtgtatatgtgtatgtatgtgcatatgtgtatgcatatacatatacatatatacgtatgtcagagggatcctactctggtcatgcccctctcgccatggggtggagggtctgtagggacaagagaatgtgcccaccccggaacccacatcctcctttttagaccctgcaactctagcgttcctgaccacatggccctgagtccacttccagggtcttccctggtctgtcatcctgagtttgaacagtgctgccatctcactggtgctgcaaggtggctggggtgagggggcactggcatggggtctggatggcattttgatgggtggggtggggtattcatgtgtgcaggcaaggcctcttagggtgctaggggtcagccaagggctgaatttgaacctggccttccaggtggttatgaagttgtatttgccaagggaggagattaggacacacttcttaatctaatagtttgctagtttgatttataactttttaaatacttgtattgttataaactataaagttataaactttaaatacttgtatttttgtcccaggccctgccattgttgggaacagggctgggcccaacagtcacattgtgggtcttctggaggcacccagaatcagcacactgcagtgaaaagtaccatatccagagccagaagtgccgggctccagggggagctgcactgaaactctttgagcccatttcctgtgcagcccaaggcacaaataccacataagccctgcccgccacaggagactggggcaagctgtcacctgcaaacaaattatcttcctacatacttataaagtagtctacacatgtaa

SEQ ID NO: 96740 - DNA, 331951 bp, Homo sapiens
  misc_feature (1)...(331951): n = A,T,C or G
ctgtgctgacaccgtctcacttcgagcatgcaccaagactctagcttcctgtcttaagacctctctgatgcagcaatgtgtgatgctaaggtaccagctggactgtcagctagctctttgcagcccagagggttggggtggtggaggcagtgggttaatgccccaaaggagcagccctcaacacacaggaggtggctgctgatggagaaatacttctcctttctccctgaggcagacagttctgagataaagtttaagaagaatcctgagaaagttctgcattatgtagccattaataggggtggaccacttgataagagcagtatctggttttgctcggacttagtttcccttttccccagttcactcccctatctctcattcctgctcctgggtgttagactcataaatagaatgtgtctacctttgtctcaggctctgctttcaagaataacctagattaaaacagtgggtaagtgcgttgttggtacattacataatgcagggatgtaattttccttgactctgtgcatctacaaagaaacacttattcagatggcagcatagttgaggatttccacctttttcctttttgaaagctcatggtccatcctgagcctgaccacctaaagaaaaaaaagttgtcataattaggttataattaaacaggaaaatttctttgtgaggatggctctaaacattttttttcctgtctgagggagtcctcagcaatttggctggatattttcgtctaatatggaagagccctcagtctacttaatcatgtaaagcttttgttgctttggaaacaagcatattaaatttcttattttccctggtaaaaaagctggatcttggctgggtgtagtggctcacacctgtactcccagcactttgggaggctgtggagggtggatcacttgagtccgggagttcgagaccagcctgggcaacatggtgagaccctgtctctattaacaatataaattttttttcaaaaagtaaaacaaacaaaaaagctggatcttttagtggtataattctttttgttaagaaattcaaacataaaaaacataaattactggaacactatcagggctttcttcattcatgaaggaatgctctgaaagatacagggagttattagaaataaattgagattgcccatatgctagcacgaagtgaaaacgtcaacaatgataattttttactcatttggttctgaagacacttcagagaacaaaattgattaaaatccctccttattgaacctgtattccagtggaacagaaagttaagacaataaaccaagtaaatcattacagtacattgaatttaaaataagggctacagccaggtatgatggtgcatgcctgtaatcctagctactcaggaggctgaagcaggagaattacttgaacccgggagggtggaggttgcagtgagctgagattgcttcactgcactccagtctgggcgagagagtgagactccatctaaaaaaaaaaaaaggtgggggggaggggcgacagatgaaaataaacaagagatggtgtatggcctgaattatatacccccaaaattcatatgttgaaggcctaacccctagtacctcataaggtaactatatttgtagaaatggtttttaaggaggcaattaagttaaaatgaggccctttggatgggccctaatccaatctaaatgctgtctttataagagaaaatttgggcatgcagagagacaccaggggcactcacccacagaggacaaaccatgagaggacacagaaagtggacaatggctggccaaggagagaggccacaggagaaatcaaacctgctgccatcttgatcttggacttctagtctccagagctaagaaaataattttctgagggttaagccactgggtctgcggtgctctgccatggcagccccgcaaactaatccagatgctgagagaatgtacaagttttttgtttggtttgtttcattggtaggtctcactgagaaaaatgacatcagaacaaagacctgtggaagagtcagttatataaatatttgggggcaggagcattctggaagaggaaaaagcaatccccaaagccctgatctggaaggaggccagggaggtttgatacatagagcattagaagatgaggttagaaaggttggaacagcgaggcagtggcagatcacaggagagaagggttctcagtggatgcagggccgtactgtgcaccaatgggatattttgaaaaactgtgaggaattttggcattactatgattggggtggtggtaatgttagtgggcaggcaacatttatgttaaaagaatagccatgctcaggacccttccacccagcaaagtattttttctacaatcaatgtgacttttaaatgccctgctgctcattcatggagatgtaacactttataaccttttatgctaacttctaaactccactaatggcaaaataggttatgggatcaactcttcattaaacaagtaaacattctggataaatatatttgatcatatttggggaatctttgctaatactttttcaagtatttttctgcctgatagtttctctctttgacttctaaaagtccaatttcatgtaagttagatgtcttgacattatttcatgggtcactgatgttctgtttattataaacttttttttttctcagtgcactttaaatttggatgatttctatcgatctatcttttttttgagatggagtctcactctgtagcccaggtggagtgcaatggtacaatctcagctcactgcagtctccatctccctagttcaagcaattttccagcctcagcctcccgagtagatgggattataggtgtgcaccaccacactcaactaatttttgtatttttagtagagatggggtttcaccatgttggcctggctggtctcaaatttctgacctctgacctcaaatgattcgttcgcctaggcttcccaaagtaggctgggactacaggtgtgagccactgtacctggccctctattgacctatctttaagcttcctgattctccttactgttgtccaatctactgataatcccatcaaataatttcagttattataattttcagttctaggggttccattttgttcttcttctattagttgtatttctcttgaaattccctgtcttcatttatcatatctacccttagtaagaatctttaataatttaaaatagccataaatatctttaaaattccttttctactgattccaacatctgtaggtctatttctattgatttatgacaaaggtgatgttgcagagcagtggggaaaggactttcttttccaaaaaaaacttaggtcagttggatagctacattaaaaaaaaaaaaaaaaaaaaaaaaaaaaactagtcctcacttcacaccatatgccaaaattaattttaggtagttagcacatctaagtgttccaagaaaaaacttaaggttccagatggtaacataagagaatgcccttgtcaccttggggtagacaatgatttctgacaggttagcgaaagcactaaccatgaacaaagagtgataaattagacctcaataaaaataaaagatttacctttatcaaaatctaaaaatgggaagttaaaatgcaagcgtttaattaggaaaaggtgtttgtttgcagcacttatctagaatatacacatcaagtagaagaagattagccaatagaaaagtgggtgaatgcctaaaaggcacttaactaaagaggatatccgagtggccaataatcacatgaaagatgctctttatctttagtcatccgagaaatgtaaattaaaaccacataaaccctaaatgttggagaggacgtggaacaatgagaactctcatcatacaatgctggcaggtctataaatttgaaaaactgcttggcactgtaattatagctggttatgagcataccttagatatttatcgcaatagaaatgtgtatctatgtgaaccgattcacagaataacgttcacggaagtattatctgtaatagctccaaacctggaaagaactcgaatgtccagtatcagcataagggaccagtcacaaaagacctcatatcatatggttcaatttttgtgagatgtccagaataggcaaatctatagagcagaaaaattagtggttgcttgaggctagaaaggatagggaagtggggttgcgggagtgatagttaaagggtatgaagtttccaggtgatgaaaattttctaaaattgactgtggtgatggttgcacatatctgcgaatatgctgaaagcaatgaattgtacacattgaattgcacactttaagtagatgaactgtatggtgtgtgaattatatctcaataaatctgtaattaagaaaaaataacagtagaaagaataaattgtgtatactcatataactgaatttcatacagcatagaataaaattgtaaaaaagacttgttacatgcaacgacacggatgaattcaaatataatataaagggaaataaaccaaatactataaaatatttaccaagtaattcatttcatgtgaaatgtcagaatagacaaaactaacagggggatgaagaatgctactattagttaatttcttgagctgagttgtggttgcccggacatgtttgtgttaatctttgaaagtttactgaactgtatttgtaatttgtacacttttttgtatgctgtacttcaacacgttttattaaaaatatttctaaaaatccaaatgttcagtaagttgtcctataatatgcattaaaaaagaattaaaaaatacacaagcatttcaaaagttattttttgtgggttagggttatggagaatttcttttctgctctatacgtctcagaattttccaaatgaccatagtagacatatattacatttatcactagaaaaaaatactattaaaatacaattgtctgagataatcttgtactacttttacactaaactaatttagttcaaatgtggggacttcagcttttgctcccagatgaaaagagcttgtcattttggagcaaaggagggcgtggcagttggtcggagtgtttcctggtggcctaggagactgccagaaactcaccaagggccaccggcctagggggaggagcagaggtgcaggtgcagggagggattcaagagactgtgaactaaacctgggtgggtcccagtcctcacaaaacctgggtcctaactgcaaaactatggtcgggcctgggaaggggcggaggactcactggcgctctagcctctgtgctgggtgaattagtgattaggctctaatcttcacagtcctcatgattctatttttgtaaggccagcagctaagagtggtttttacattttcaaaacaaagacgaatacgctacagagacagttccaggcccaaattctagagtatttgctttctggctccttacagaaaaagtgggtaaacttcttgattagagggtctaggcagaagaattctaaggtatttaaaatttttacctgggaatgcgcttgctggtgaggcggagccggcgtgaagccagtgtgcccagcggcactggtaccacgcgatgctggattgcctaggctggtcagacggagcaaatcggaatccacggaagaaaattcacctcttaaggatccagtccggaaagggatggccgggctcttcctgggcaggggtgcccaaatggatgaggatgctctctgcagccctcggcggatcgcaaaggagcagggctccggtcttctatctgggaaaacatggttgtcactcgtggagaagccaacggagcccctgcggagttttctttccttttctctgctgcaggcagaagaagcgcattgcgcggttcgccgggctgtctgcaactttgggagctgcgccgcgtgggtgcggccagccgaccggcgcgtgcgcagtgagttctcagcgcctcccgccgcgcaggctcggcgttggcctccgcggcccgtgcgagtgcgcccttctcgggtcccctaggtcgcggggcagccggggcggaaggggcttgttcattattttgagagtttgttgtgaacgtcataacctttcgtccttaaatattgccgatacttgacctacgcaagagacaatgtcatgtgattcagcctaatatctcagtatgtatcccctaagaataagggatttttctacatcagggtttctcaaccccgcgctatggacattttgggcaggatgagtttttgctgtctgtacccgtaaggtggggtgacggggtggggtgggggtgtcctgtgctaaacaatcactatttagcagcatccttggcctctacccattagatgccagtagcaaccccctcccccagttgtgacagccaacgatgcctccagacactgccaaacccaaacggtgtggttgggggggttgagggggggaggggtagtggtgagggttgggggaaaaaggagaggtacaaagttgcctcaattgaggaccacaggatcacaatgcacatcatcatacttaggaaatgtaacattgttatattacaataatctatatttcatatttgaatttcctcaattgtcccaaaatgtcctyctttaccctgtagtttgtaaaatgtaaatccgagatttaacaagaatcacatagtgcatcaataagaaccacatattgcagttgtcaagtctctttcgcttccttcaatatagagcagttccctagccttttttgtttgtttctcctggtattgacatttttgaaaagtctagcccggtggtcttccagaatatccttcaatttggagatgtcagattggttcctcattataagattcacgagtaatagatatgtayacacaaacatatatgcaggaattctacctaggtgatgtatccaattttatctattttcaaatgactttttagctgtcataacatttaatttataaagcacctccctgaccagcgatttgcaatatttttatcacatacgtaaatttccacattgtaattgggtctaagatatattttcttttttccccgcattgatcttattgtctacttatgggctaatatactgtttttattagagactatatttcagtatctggtagggctagactgcatcattgctgttttcttaagtgtttttttaatgctgggttattttttcatgttaactatagaatatagccccataaaagtactttcaaaaaaaaaatcttctgcataccttttcagtttatgatgttgcattttccttttgaaaagcaaggtttattttttctcgtgctcaagtttcagctttgtgtctttcaaggaagcatcataaaggtttttcacttgttaagtttattcttagagtatttctcttttttgttggtatcgtaagtgggattatctcttccacttttccttataacagctagattcttacataaatgaaggtactgatttctatgtctaattttgtatcttgctaccatattgaatctcctgttgcttctaggagtttcatgttgattgtatctgtatctctttttacacttttatataattgcagtgattatccattttgaagttcaaattgcccgtctttggccatttttggctcctttgtttatttgacacaagctcgaatgtcttgatagcttacttgctttctgacactgtaagagttccagtctcatattgtacatttactgcctcagacctagaatcagccatttctcaaaggtgtccttgttgcttccagtgaaaaaggtatttggatgctacagtctgcactgaaagatgttcatggttaaatggcttatcacttcccagacttttcaacacaagatctaggagagatgtagtttttcaaagaaagatgaaaataaataataaatttgtgttgatattccaattctaatagaaggttatagagtttttacttatttgattttatattgcatcttttttcccctatgctgaaaatcatggctcctaaatgatattaacagaattatttacttttctgcataatatatataatagtttccaaaatctaccagtattacaactattagtaaaaatgttagatgtagttaaatacaattaggcttatttatctcatgttgttttaaaatctaggttgcttgctgggtgcagtggctcatgcctgtaatcccagcactttgggaggctgaggcaggtggatcactcaaggtcaggagttcaagagcagactggccaattgcgccactgcactgcagcctgggtgacagagggagactccttcaaaaaaaaaagaaaaatctaggttgctcaattaaaaagaaaattaaatccaaaatccaaaatggaaaagaaccttaaatatatctaacgttttctttttgagtggaatatctaattcataatttcattatttatttaaattatcagttttgttctgaacactctttagctgcatcttgtcaactctaatgtcatgttttcatttttttctagaaattctcattagcaattgatatttccctttgagacaagctatgtttaataggaaaattttaaatttcaaaatggggctttcttatgttttgattataaatttctggttttatcatattatggtgaatatttagatcatttttatgtgatttactggggcatacatgtctgtattgtaaattagagtcaattttctaagtgtttttgtatttttttgtctaattaagagaaatgtactatagtctgctattattagtgtatttcaatttctctttgaatctcttataattcctactgtatgaaagtagctgctgtgttattcactgcataccttttcataaatcttttattttcactgggaattgtagcctttaggattataagatgttctttgtctcaataatggtttttggtctgaattttattttattgaattgcaaaatctcaattctttctttttttaatttgcattttctcagtagaactttacccatccttcctttcattgttagcatttctgaattgttttgttttaggtgggtctttgtcttttatatacagcatagagttggattttcctttgaaatcaacctgtttttctttttgttttaacactgaggttgagccctctgttggctgatatgtttggtctcagttatctcctgtattatatttacctgtgtaatatgtagcatatttgatggtgatacgtgctattgaggaaaataaaggagaaagggtgcataaaaaatgctggggagaatattctattttaaatagtgatcagggaaggcctcacggaggaagtgatttttgcacaaacacttgaaataggcaaaagaatgaatcatttggataaatgaggtaagattgttcctgacagaggacagctagggccaaggccctgaggcatagagtagctagtgtgctctaaggaacagcaagggagctggtgtgatcaaagttggtaagcaggagaacagtaggagataagaccagaggatcagatagggccctgtcagtagggagcagagagtccctccttcaagagaaattttggtaccagatgttgaaataatacatctgccataccacagtaataaattaataactctatgagaacacataaataaccctgggaattccagcctaggtaggagaggaaactaggcttgcgggtatgatattttgggtacaactcaaattatgcatgaaagtagcttcgtatttgctaactttgggggttggattactaaagcacctttcccaacccatacgattgcaggaatccttgactgttcttcaagtctctcatatttcagtttgtagttcatatcctacctccaaacatatcagatatagataacaactatagcttttggctatttatctgaagctgtacatttacagaggaagaattttattgcaacattcatattaatgaaaggtattttgactaatacatgttcaaaaagcatgaaaacactaaaattctatactcagaagcttgattaaaggacagaaaatgagagatttttttgaattttttaaaaaagtcargtattagtttttaaagagttttttgtattttttgtttttctttttataggaaatctgttttgacagaaaactatatggcaaatgtgtgcgtgtgtgtgtgtgtgttggggaggamtagggatgaattcagtctgtaatctagaaaaactgtgtccaggataggaacagagaagggacaaactttatatgtatacacaggattactttttccttttcatgatgtgttttatttggaagcatttacatgttctctttctcttttcctccttttttttttctcctgcacctttctttttcttaagctaagctgtcacagtgaaatactgtgactaagccacaactcatatagaaaactgaacggtgcattgtaaaataggacacaaaacaaaagacttcatccgagagctgagatcatcacgagtacacagacccactgcagtaattcaacagtgtttctcagagcccaggacaattttttcaattcgtgatatcctactgccccctgctgttcatgtggaagcactgactacagaaattaaagttttcataacattgcacaggttttagtgcaatgttagcgtgctatcaaagaaagttaagtagttcaaagatttaaacagagtaatttaaggaattgctttctaaaaggctgaatatcaaagaaattacaaagcaactttctctactgcctgatatgttgaagagaactctaatccagttatttggctaatgaatccggtttcgtttttaagtttctgaggggagcagagcagaaggcaattgaggtagcttagagataaattagtaaagatagagcagggagtagatggagcaaatgaaaggcaaaatgtgcaagaaggagggggtaatgaataatttacatcctcgagggtaaagcagttcagtcctgaacagatcgtttacattcctcaggggggtcgggcagaaacgggctccacggaaaagcccggatgggccatttgtgagcctcagctcttctgcctcctgctcctggatttgatcatggaaacctctcagggcagttaggatgagttggagcctctgaagcagagcagaggcacatcatctttagagctgatttcctgggcttctctgcaatttgtaaagagctcaggggctgtctcctggatgtaagtcagcccatgtgcaaatgcgtatgtgtgagcatgcgagtaggatgttatatgttccacgttttagactctgagggctgctagttcctgcatggcagaccttccccttgggattaactaataaggtgctagcgttccccgtcactcagcaaaagtagttagaagcttggggccttgcttcagcatttgtttttttgctgggactctttctccatgaggaacacgactggagaagaaacgttcgatatttagaaaattaaatgtatccatgttatgatagatgtagaaatccagtccaaactgctcgtgaaagatgtagtttttgctataagtactataggagtgtcacttctaaaacttccaaagttcctacttcaaaggcacaatgatggattttaaaaaataaaactttgagaaaacatttacatggtttatttcaggtaacaattaataacctgattccttaatgcttggggctgttacgttcatagcattgcttttagtgctatcatttcctatttctcttgtatgacatattgtattagtctgttttcatgctagtaataaagacatacctgagactgggcaatttacaaaagaaagaggtttaattggacttaaacttccacgtggcaggggaagctttacaatcatgacagaaggcaaggaagagcaagtcatgtcttacgtggatggcagcaagcaaagagagagagcttgtgcacgggaattcctctttttaaaaccattagatctcatgaaactttytcatatcatgagaacagcatgggaaagacttgcccgcgtgattcaattacctcccaccaggtccctcccacaacacgtgagaattaaagatgcgatttgggtggggacacagccaaaccatatcattcctcccctggctcctcccaaatctcatgtcctcacatttcaaaatcaatcatgccttttcaacagtcccccaaagtcttaactcatttcagcattcactcaaaagtccacatctgatacaaggcaagtcccttctgcctatgagcctgtaaaatcaaaagcaagttagttacttcctggatacaatgtgggtacaggcattgggtagccattccaaatgggagacattggccaaaagaaagttgctacaggccccatgcaagtccgaaatccagcggggcagtcaaatcttaaagctccaaaatgatcttttttcactccatgtctcacatccaggtcatgctcacacaagaggtaggttcccatggtcttgggcagctccgcccctgtggctttgcagggtacagcactcctcctggctgttttcagggactggccttgagtgtctatggtttttccaggcacacggcacaagctgttggtggatccaccattctggggtctggaggatgatggtcctcttctcacagctccactaggctgtgcctcagtagggactctgtatgggggctctgaccccacatttcccttccacactgccctagcagaggttctccatgagggccccacccctgcagcaaacttttgcctgggcatccagacatttccatacatcttctgaaatctaggtggaggttcccaaacctcaaatcttgacttgtaagcacccacaggcccaacaccacatggaagctgcccaggtttggggcttgcactctctgaagaaacagcctgagctgtaccttggcccctattactcaccgctggagtgcctgggactcagggcaccaagtccctaggctgcacacagaatggggaccctgggcctggcccaggtaaccattttctcccaggccttctggcctgtgatgggagggactgccatgaagacctctgacttgccctggagacacctttcccattgtcttggggattaacattcagctcctcgttacttatgcaaatttctgcagccagtttgaatttctcctcagaaaatgggtttttcttttctatcacattgtcaagctgcaaattttccaaactttttatgctctgcttcccttataaactgaatgcatttaatagcactgaagtcacatcttaaatgctttgctgcttagaaatttcttctgccagataccctaaatcatctctctcaagttcaaagttccacaaatctctagggcaggagcaaaatgctgccagtctctttgctaamacataacaagagttacctttgctccagttcccaacaagtccctcatctccatctgagaccacctcagcttggaccttattatctatgttgctatcaggcttttggtcaaagccattcaacaagtctttaggaagttccaaagtgtcccacattttcctgtcttcctatgagccctccaaactgttctaacctctacctattacccagttccaaagttgctttcacatttttgggtgtcttttcagccacaccccactctactggtaccaatttactgtattagtccatttttcatgctgctgataaagacatacctgagactgggcaatttacaaaagaaaagggtttaactggattagttccatgtggccggggaagcctggggaattcctctttttaaaaccatcagatctcatgaaacttactatcaagagaacagcatgggaaagacttgcccccatgattcagttacttcccactgggtccctcccacaacacgtgggaattcaagatgagatttgagtgggggcatagccaaaccatatcacttattaatatttattttctcaaagttatattctccatttgggcagtgctaaagatgagaagaaacacagggcaggctatgtctttaagacttttatagtaatttagaaaactgtagaaccatagcatgataatcatggaagagtgaggtggggccaagagtaagaaaataatctccccattatcttttattctatcagtttatcctatcccctcccccgcatcccatccacatcccctcccatttctccgttctactctttactatttcattttatttgtattgatatttaaatttcaaatcaggaatactggctattctgtttatgtaattttgctcaatccatagtacaatgtttgcatatagttgcaataaatctctgttatgaacaccaacacacttactaattgcctagcattatgctgctcctatgtaaaacagttgtacatttgatttcaggaaaggagaaaagtgaagttggagggaatttatgtagacctataggaagaactagaaatatttgtttgtattcagactcttaggggcratgagaaagttcattagtgaaaaaagctagaacacaaaaatttcaccttgtaagtatctgcggaaatatttctctttaatggttttcttatgttgctaagaaggatcaacttttaacatttccctttgtgtagtttcttgtcagatctgtgtacacgcacctaccaaagatagggtgggaatttgcattttttatcaatcccggagagccgataagtttagaaaaagaaatwtaaacttacttttttttagaatcaagaactaacttactagtgtttcgctgtacaaaatttacagttaattgaaacttggttttgccttctgaactgtttgcaacccaaattgtctgctcttatttgttttacttaaattgtattgaatactaatatctaacaaagttgtagccctaagtggttccaaaatttcattaagttactgagaagtggatcttctctgcaaatgtattgtggtgtatatgatctcttttcttccccttctatggttccagggactcttcatagaaagtttggaactattttctgttacgtggtagtggtagaaatttggatggaggaagttcacagggttaaaaaaataaattgttgataataacaaaatagtttcaaggcttcttttaattctcatattttgtgattttccttcacatcagacattgcataaagtatgttaaaacaaggtcccaacttttgagtttcatttcaattagacagtaaactattgtctaatcactaggaaatattttgtgagtgtttcattgcatagggtgctggaatagatgctgattagagagaactgcacagactatgttcctgtcctcaggttatttataatagcatgtgagatgaaaacttaaaaaaggtcaaaacacagaattagaggaaaaggtgagtaaagtatttagcattttacttctatttcagtaaaatgtctcttgggagccttgggaggcaggatagaatgattaaaaatgttcaaagaacaaaccttcatgtcaaattatccacctgaaaagctggaattcataagcgtagacctcctgtaagatacagcaaagaatcagcctttctctacccctagactccctacgtcttgtttaagcctggatcatctcggtttggattgcagaaaaccaatggaaattgttagagctcctccttattgatcttccttgcacagccatatagataatatggttgagatttagaagaaaaaagaaggtccacgtgactgaaaaaaaaaaaaaactgtgttactgagatgctgaaaatacatgattaagtagcccaaatagacaacacaaataatttatgtatcttttaagttggtcagtatgaggtttgtatttaaattgcatctctcctcaattcaaattgccttaggcttttgggtatttaaaaatattttgtattcatgaacacttcttttataattgatgtagatgcttgcttatagcccaagtctaatttgtaagctggaaagttcatttatttattcattttacatctattatatattagatataataattgatgagccaaatatgatggtatgatggtagggattgtttttttgttttgttttgttttgtttttgagacagaattttgctcttgttgcccaggctggagtgcagtggtgcgatcttggctcactgcaacctccgcctcctggattcaagcgattcttctgcctcagcctcccgagtagctgggattacaggcatgtgccaccatgcctggctaattttgtatttttagtagagatggggtttctccgtcaggctgacggatttggtcaggctggcctcgaactcctgacctcagstgatccgccggcctcagcctcccaaagtgctgggattataggcatgagccactgcaccaggcctgggataggtttttaagttaattttaaagcttacttacattatcatgagctctatttacctaaattccaagaaattctgtgtgtgggacaaagcagggtcccaccaagtggccctgctacactttgtctagatctctgttgtagcacttattgcatttttcttttttgacaattttgtcagctggaatgagagcacagtgtggtctggatcgatctgattgttactgtgtcctcagcacctaacacaaaacctacaacacaatagaaacccaaaaagagtggcttggatgagtaaagcatcatgtacacatgcattgctctatctaagggcatttttattctcaatgggtgttaaggccatttcacactctggcatatcatctctaggaaaaggcagaacccctcttatcttaatatcttccataatttgactgaatactgagctgaagcastttcacatcagagtgaaatctgattcaagtcatttttgtaataattagaccttaaggtttagattgagttatttgggtgatatttatgagaacaactgttttatactattcttaagaatatttttcaatttcctagtaggtaaaatcaggctttggagaagcagttcttgcctggagaggctgatgaggggttctcttgagaaaccttcgtagccatccagtattaattgctttccatgtattcagtgggtttatgtccacagaaatacattttatgagtactttgagaatgaaacagtgctgaacggagacagcagtcatatgcagccagaatttatgtgaaattactgatcattctcatttagggtgggagtaaatgatggtactttggagtgaaatttctggttctgtccttatagctcatacaggattgtcatttactgttgagtggattgtgaattccacaaaaaaacacatctaaagtgtatgctacttatagacattataaatttggttatttattaagataattttgtgagcagtaaagtgtctggttttaataaaatcaatatattatggccacttttattacagatgggataacatttgatgaagaggtacgttgtttttttattttgttttgttttgtttttgagacggagtctcgctctgttgccagtctggagtgcagtggcacgatcttggctcactgcaacctccgactcctgggttcaagcaattctcctacctcagcctcccgagtagctgggattacagatgcgtgccaccacacctggctaatttttgtatttttagtagagacagggttttaccatgttgtccaggatggtctctatttcctgacctcgtgatccacctgccttggcctcccaaagtgctgggattacaggcgtgagccgttgcacccagctgtttttttttaaatttgtacaaaggctgtatatggacttgcggtgcctgaacttggacaagttacataactcctttggctttcatatggagatattaatacctaccttgctaaattggttataaatattacatgtgtgtggcacacagtcagtgttcaataaatacttttgaatgaatattaaagcactaagcataatgtctgtgatacagatttggtaaattgcggcccatttttgccttgaatgagggaaattttagattaatagtatatgtgtaaatatgtgcctttgaagtttcttaagtgtttcatattttgcacttaattactgcatggtactacctaaaatgttcccaataagatgtttgggatccttctttaatttcctgaggagtacacatccagtataaaggaaattatgactatgtgacacattgaaaggaaaaattagtgactcatagttgagcttattttggaatcctaaaatatgggaatcctaggtttgtaaggaaacatttaatccaaactaccatcagttacttgaatttcactttatttatcagatgtatattgatcagttattatatgttggaactgtgctatgcatgaggactacaaagataaatgagatattcttgttgagaagttacagacctttgcgtgaacatttccagggacaattcacaattactaaccttatttttaggaatcttatgacaattcaaaatttatctttatctttcatttattggcttagcttttctatttagggtacaaagaagtaagcataattattttttagaaaaatatttcttatacatgaacgaaattgaatttcttctgagacatctgttcttcaactgaaacatcactgcattactctgctgttcctcaagcctcttcaccattttgctcactcctctgaatgccttccaggttgtctgctaagatgtggaacatacacataaccagggtgtccaggctccagctgtagatcagccatcacagaacaatttctttcgcatatcagatactgtctttcaaatctgtggcatgatttatactcataactgtgtgaccaatatrtactataaactgtctaatccctattgttatttaaaaagaatatagatgatctctctaattccttaaggagcttttcatatactgttccaaccatcaaaatgataataatgggggcaaccttgctagaggtctaggttattgaattactatttggaagtcatttttggtccagttaattaaagccactgtaatttatataatttacgacaggtaggtggtagatagctaaggaaggacttctatagctttgcagatctgttttctataaattgctgtgtcacctaaacaattgttttcaataaacaatgtgatargtaattctatttataactctaagcacttactaaaaaaccttaatatctattcactttttattttagttaacaaatgcatgaaatgcctctgtaccaagtgtactctgactcagcacttgggacaagtgccctgcccaccagaacagtagaagaagacagttctaactcagagacaatttatagctgtgcacactgctatgctttgctacttatagaagaaggaaaggacaaacaggtgtggtaatgaattggaagatggagacagggaagagacctctgtctgtatgaagggtgaatgtttggaagccgtgggagaggtagacctggatagatggtatgttagtttcctagggctgctatgccaaattaccacaaactttgtggctgaaaacaaagaagagcaaagaaatttgctcttccatagtcaggaggccagaagtttgaaatcaaggttttgacctggccatccatgctacctatcaaggctctggagaagaatcttcctttgtctctttctatctttgtctcttggcaatcattggcattctttggcttttatatgcatccctccaatctctgccattgtcttcacatgaccttccttcctgtgtctcctctgtatctctgtgtccaaatctctctctctctatctctctttttttttttttttcaataaagacactagtcatgagattagggcctgacttaatccagtgtgacctcacttttacttgatgacatctgcaaaaaccacatttccaaagaagctcacatttacaggtctgggtaatttagtctgtttgtgctgccataacaaaataccatagactcagtaattcataaagaccagaaatttatttctcatagttctagaggctgtgaagtccaagatcaaggcaccagcgggtttattgtccagtgatggtccagtctctgcctccaagatggcgcctggaatgctgcatcctctagagaggatgaatgctgtgtcttcacacagcagaagacaaaatggcaaaaaaggatgaactctctccatcaagcccttttataagagcaactaatctcattcacaagggaggagctctcatgcctaatcaccttttagaggcaatacctcttaatactatcacattggcagcacttgaattttggtggagaaactttcaaaccatagccaggagttatgccttgaacatatcttttagcggaaacaattcaatccataacaggtgagatggaccaaattatgaaacactttaaatgaaggtggaagagtgtgggttttatttataagtcgggggccactagaaactttaagtaagggtgctaatgagataataacaggaaggtctggtggaggtatgctatagcatgctgagctgaaaatgaagtttagagatgaggatattaatgaggatatcacagcagtgttccatggataaagtgaaggatagtttataagggaagatgtagaagaatgtattttttcaaagatggctgcagcaatgtctctcataccacttgctctttgtaatgagatcttctcacagccttatcaataggtagtatctgtttctctacctgtgcatccgggcagacccagtgactgttttgaccaatagaatagggtgaaagtgacaccttgccaattattaatatacgcatagacttttcctgcccctttcctaccctgagagcaccaagctgtaagaagcctgagccatggagctatgtagagaggccctggaggcagggccagggccagggtgaggcaagagaggtgccttgtacaaaatttaaggaggtgctctgaggtgcatttgcatgacactgagaagaagtgtcccttaaattttgcacccaaggcacctctcttaactcgattcacactagttctggacctgccgagggagagggagacagagagggagagggagatggagaggggagaggggagaggggagagaggagagggagaccagaaacaccatgggaagtgcaagacattaaaggaaggaagccatcttgaacgttggtcctctggcccaggctaacagctggcaccaagtggatcagtggtgaaccaccaagctgacccgtcctaaactgatccacaaaatgatgagtaaaacaaaattgttgttttaagccacttagtattgaggtagtttgttatgccacaatagattacctaaaacaccctcatgtcttgccagtattatgtgaagctagtagttgattgagaaataccaagttgctctctatttactgaaatttaacagagctgaatgcttgatagttccttagggtgaaaggatgaaggaagtgatgagagagattatagcgggtagcagtctaggaaatagaatttaatgcctactttcttcagttcactgcttaagctacatagccatatggcttttaatgtttagggttccagaacaaaaaggtacacacactcacagttggggtctttatagaaacaaaactcatgtctgttttgatctatgccatgcagagtgctgtgaaattcccattttcaagcaaatggtctgaattctgatgctaaatgaataaaattttccctggatctcattagcccgcacttgggaaggaggggagtcggttaatctatttcttcttggctttgtctgaacaaatcaagctttgaataagaggtttaattttatgaagactgaagttactaattttcattgagtacctctgttttacagtaatttacacattcttttgaatggttgttggaatatttacttattgtcctctgaggcattttctaattacttgtaagcaaggctgaggaaaaagaaaatccagaaaaaacgttaagaaagggactgtttggtagacaaggtgtattacacataaaattaaaatataatggatacttttaaaagcctttagtccattttatagctttctctgcttctgcaagtacatagtaagtgaagatttcccaactcattattcatttctacatgatgttagacatttttatgacctcctagagtacttataatctgtactacacaatttagcagctaattatattatgttcattattatgtcattataagttctcatcccctcaactagattatatgatcttaaaagtcagagagcatgtcttctgtattcacattccaactagcataaccaccacttggggcattttaattgatagaagcatattgagttctagtccctcaaatttcagtgaatgttatctgtggagcacctgtcacagctctggatataggggcagagataggcaagttactttttctttcccaaggagtttgtcaacaagtgttaagtaccaagtactaaggcgagggattactttgacagagtgacttcctttctctttttcctttagtgtcagaacagggcagaggaaaagcagagagccttgagccaccatgtcattatcattttgatgtagatggattattggcatttttttacttctctagttggacaaaacctaatggtgtctgacccaggaagtcttacttgtctgagccactaggctaaatggttggcagaattacatttctcttgttttgagtaagcatcggggtatcagactcacatttttttattgtgataagacatacatgacataaaatttaccactttaatcagtcttaagtgtacagtttagtgatattaagtacattcacattgttgtacaatcaccaccatcatccatctctggaacatttttattatcctaaactgaaactctgtacccattaaacaaacacttcctattccttcatatccccattgcctgctaaccactattctactttctgtctctatgaatttgactattctaggtacttcatataggtggaatcatacagtatttgcccttttgtgtctggcttatttcacttagcatagtattttcaaggtccatccaagttgtatgaggtgtcagaattccattcccttttaagactgagcaataatctgttgtgttgtaataatccatatatataatatctacattatatatatataatgttttgttgaaccattcatccattggtaggcatttggttgtgaataatgcagctatgaacatcgatatacatactgatccccattattctgaacaccaacactgacttaatgctcatggtgagcaaagtacccttcttagccgttaaaatgcctggaagagtcagtgaatctctggaatttcataacttgaattcagacttaaatactcattaggaaaatatgacttggcaacattttttagattaggatcgtgaccaatactgggattcagtaaatatgtcctgtttatttgtccttcagagtgtttcctgtgtccattttttttctattttctcatgacttaattgtatatcctcattgctaggcagcaggactccagcagtcacattctaactggtctctccctttctgatttttcttataaaatgctgctttgatcgttttacattactggacaaaaattttcagtggctcctcatcatgtacaggacaaagcccaagctcgtttgcctggcacataggcctcttgggatctggcagcagcgtaccactcaggccctacttctctcacttcatgtagaaactctgcccaagccaacattgtcttctcattaccctctgaataaattatcattttcttggattttctcactgctgtttgttccatcatgtataaacatttggatgctgtcttcaagttttagcttaaatatcagcatctctgctaacttttttttaaaaaaagattttgaaatgattgcttgctcttttgaatgtgtgtgcatttattgtaagactaatcatgttaatgatgtttttgcaatagctaacatttttgagcccttgggctaaagctaagtgcattacttgcattatttcattcatttttatagcattttatatgaagtatatactatcattatccattatacagatgatgaatttgaggctttgagatgctaacttgtccaaaatcacacaactgttaagtaacagatctaggtcttgatctcaagtttttgccgccaaagcatcacttaagatgtatatttattgcattaattagattataggcctgtaagtgaataagggctttactgaatcccccatgggagctacccatcagtggtcaaagtcagtaaaaggctgcccattgaatagaaatgttttttaaaattagcycactgtggataagcttagcatgatttttcaactggttacttcatactgtttcttsaagatgaggaaagcttcacaactgttcatgtttgattaggcgcattcctgaggcatgtctttctgtcatagcactgaccacactgaccgtagttatctgtaacctgtgtgtctcccaaacatctttgcttggattcctggtacctagaacaatagcctgcctgcacatatgctcaataaatgcttattaaatgaatgaatgcatctgtggccattgtccatcctaaaaattactttctaaatgtgttgctgttacagagttgagtaatacataattccagtaaagtcaaacaaagtatctcctcaagaaggcaaaatgacaatgtaaatgaaaactatattttaaaaatttgtgctgcaacttacctttcaggatgtaatggtttttgtggtagcatttaacaaaggatatttgaatgtaagcggttgatgtctatattcatggaaaagagaacctgtgtgttaaaggcatgagtgtatttggtctataggcaatttgggagcaggcatatttcagagtttcatacagtgttctttaaaattagccaattctgttttttctggttatgtgctttccaaacaatcttctgattaataattggattactcaaataccttgatacttaaaagccaataccatagagagtagatattaatatactaggaaacgtatattctaaacaaaaataaaatatgagtctttatgttttaattatttagagtttgttaactttgttttaaaaaattgaagcagaaaagctgaggacctaccttagacagcagtgacacatctaaaatatttcccctagagttcttgcctgagaagctagtaagctttttcttaatgtttctatatagatagatccatcaatatctggcacattgctttacatacagtggacatataacaaatactttctttttattttgtcatttcaatagaatatagtactctgaagcaacagttgtcaatcattttctctttgtgacacacatgatagatgtaacttcaaccttctaacacgttcccacttgccaactcaagtttatgcttcattttatgtataccaattgtagctgcactttctgcctcccattctggaagcatatggaaatgtacatgagaatgtgttattgtagaggtgataataataagaaatgataataataataatactatagcaagaatatttcaaataccatctaatcactgttttgtttgtaaccttgcaatagtttcttgttgcctagagccagttcccaaacttttgtttgggacacagaactcaccatggtggtagtactggtagcagctgggtgcctcagcccctgcaggatggagatccactctggcagacctccaggacccttcacattccacaccatctgaaaaatctcaagagatgtaagaattacaacttagcattcattgtgagctcatcttgcttcccagtcagatgcgggtatatgtagattcctggatactccaggattgtgaactactctagggaaatctcagaggcaatttgatatggactgtaccttcctgaaagtttgttaaaaatgcagtaacagaaatactttggcctgctatgaagttagagaaactgcacaacaaggataaacttacttgactctgaagattttatttttgagcactgtactgccacttcccatttcattaggagtttaattctgataaaaattcagctcctttgcacaacagaatgttaattttccttgaatttcagacattttaataatgtccatcctaaaaattactttctaaatgttcttttgtcccttataggctagtttatggtacttccaaaaggattccccaagcaattcggagcaatcgagtcattgatggactatcttttaatatcctaaagctaaaatagtaaattatttatttatttatttatttatttatttattgagacggagtctctctctctcgcccaggctggagtgcagtggcgtgatctcggctcactgcaacttccgcttcctggattcaagagattctcctgtctcagcctcccgagtagctgggactacaggagcatgccaccaggcctgactaattttttgtaatttttgtagtagagacgaggtttcactctgttagccaggatggtctcgatctcctgacctcatgatcggcccatctcggcctcccaaagtgctgctgggattaacaggcgtgagccaccacacctggccaataatttatttttttcatactcacattatggtataatggaaagaatgactaggttcagatcctgcttctacaacttacatgctaattagacattgggcaatgcagtttcttcatgcattcattcattcagcagatgttactgagtccttactttgtggcagacatagtattaagctctgagaagggaagtcaataaaaataatctctgaacgtccacggagattttagtctattgggggagactggcaagcaagttagcagttaaagtggagtgttactatggaattatgtakcagggtagagtcctgtggaacttaaaaccaaggcaggtgtgaattgagaatgggggagagtgttagggaaggcttgttggggaaagcagtgcttaagctgagtcttaaagccaagtataatttagttgaatatagatatagaaaagagattctagtagcatgaacaagctaacagggaaacataaaataataaaacatgtttatagaccaataattactgttcattattactgttacaagtgttccatcttgatgagacaaaggagataaatcttggcaaatgtttccatttccttttctctaaaatggagataattatatctacctcgtggatttgttgtgagcactcaataaaacagcctttgtctagtgcatagcccatgcgtggtgttcaacaatgccagctccttttgctccctaccgtccaccctttctcttgccctttctcactcctaattttcctaggtagaaacaccctgtgatgactgagttatcaatttggaaatgatggccctgtgttggaatgtgaagtctgttttgtttctgaccggaattgtggaactgaatgggggctgggcttgacagcagcatcccttattttgaccctgctcagcttcctatgtcatcacagttggtatttgaggagggcacaggctcccaaagggcactgtattcttgatctgtgtgttttgctgagcccggtgctgagcacaggtcatgtgcgctagagtgcctggaaaagcctttgaataatatcgttgtgtatgctgtcttgttttttaccactttgaggtctctaaatttggatgtgtgtcagggagcacagtttttcagtacatatttttttttctgcagagcaggtccatagcttccataatccagcaaatattaaggacccttccctttggggatttttaatctacattttaatatttctttcaaggagcattgtctcaaatactgaattgggtcactgggaagaattacctagtgtggagagattttcctcatcccatggtttattgttagtaagaagctgttatttatgttcaagtgaagttttcccaaatgtttgccatttgcaaatatctttyattattttcgtcataccatggaccatctattctgtaacctgcttaatatttttctttaaatctccagccttttaaaaacatacataagtttaatttcctcccaagtaataatagttgtgaagtcatgggctggatgtgctggttatatttttctaatatattttcaagcaaatcttaaaaaattgttcatttcaccacttaatataggagttggcaaacacagccaagccattttaaaatatattctccatggctgcttttaagctataatagcagagttgtttagacagagacaatttggcctgggaaaacaaccatatttattatttggctccttaagaacaggtttgccaacccctgatcttaaattatttccaaactataagcagaacataaacctactctgcagaatgtcacccagtgcattcgtcaagggacagtgtgttagatccttaacattttttccagaatcagcaagtactttacctttttattctggacatgaaatatttaatcaataatatatgttctgagaactttggtgacaagcctatttgagatcaaaagaaaaacacagacattaaggataatttatatatttttaaataaagggaatttttgcctataaaaatatctaatggtaaaaaaaaaaaaaaaaaaaaaaagcataaagtaagaagtcaaaatttcccggcaaggaaactccattctcacccattaaaaacaaaattccttatatttcctgctagtcatttttctgtgcctattcaagagaaaatacattctttttgttttttaaaatatagtattttttaaaattaaaaaaacatataaatatgcactacttgtttataacttatatatacttcttttgtttagaagtataagtaatatggctaaaattataagttgtttaatattccttccaagtatttcttgaatcttattgagatgcaatttctatattgtaaaaatcacccatcttaggtttacaattcattgattttttagtaaatttacagacttgtgcaaccattaccgcaatccaatttgagaacatttctatcattcccgaaagattcctcatgcccatttgcctttaatctgtgttcctgccccagcctcaggcaaccactaatctactttgtttctatggatttgccgtttctggacattccacataaacggcgtcatatatcatacaattttttgtatctggtttccttcacttagcatttcaaagtgactttaaggtataagggggaaagggttcaaatagcccaaggtatctttattcttttgcttaggttgctctagttacagtcaatgatctgtttcctttgctttggaaatttgcctttgagacaagcagtgataccagtgccaggtaacctttgatgttttaaaagcagttcctgacattcaccacttcccaaacctgtatggcacacatggaaatgttgatatttgggcagcactctggagtgaagagaagagactgctcaccrctggtagcaacaggtccaggtggctctgggccctgccctggccactttgagkggaataatatcttggtacagctgtagcaaatgtgcgtcagcccagtgtgctctgccatacaggctaggaagttttcctrcaaagcttgtggttttgatgtaacaaaaccttctcwgtgttcttatgaaagtgtcatatgggcccaactccaagatcccttttctcagctcagcttttatctaaaatgatgactaaaagcctgttcggaggctgccaaaaccagtgaggagctgagttaatcttctctctaatatgtccacaaatatagatgtacctattcctttcttaacagctgaattagaatttcattgtttcaacagaattaatttaatccgttcattagtgtgttttcctcctttttcattatatgagctgtggtaaaatttcacattgccacttgcatgttctttccttcttgtgcaaatatctgtagaataaattccttcaagtaggcctgctgggtcacaggctgtgcgcaattcaaatgtggttatctgttacctgaagtggcaggttgattagcgggatcctggccacagctgatgatggtatcagtgaaaggctatgggtactagagcagtggttcatagggtaggtgcagctgggtgaggatgaatgtatttcagtgtgtcctagatgtggaaattgactggggattctgatacgggcaccactatacatgcacgggttcacttccaggccactgccataaagtgaatattgaaataaagcaaatcacatgaatgttttggtttcccactccctataaaagttatgcttacactatactgtagactgctgtgaatacaatagtgttatgtctaaaaaacaatgtatatatcttaattaaaaattgtttatactaaaaatgctaatgatcatctgagccttcagtgagttgtaatcttttagctgctgtaaggtcttgccttgaagttgatggatgctaactaatcagagtgatggttgctgaaggttggagtggccatggcaatttcttaaacaacagtgttttttgctgcatcagttgactacctttgatgaaagacttctctgcagcatgcaatgctgtttggtagcattttcgctacagtggaacgtttttcaaaattagagtcaatcctctcaaaccctgccactgccttatcagggaagtttatgtaatattctaaatcctttgttgtcattttaacatgttctcagcatcgtcaccaagagtagattccgcctcaataaaccacttcttttgctcattcataagaaacaactcccaatctgttcaagttttatgagattgcaacaattgtcacgtcttcaggctccacttttaattctagttctctcactatttctaccccatctgtggttacttcctctcaaattattgaacccttcaaagtcatccatgaaggctggaatcaacttcttccagattcttgctaatgttggtgttttgaaatccttccatgaatcatgaatgttcttaatggcatctagaatggtgaatcctttccagaaggtttccgatggacattgcccagatctatcagagtaattactatctataggggaagctatagccttatgaaatatatttcttaaataatgagacttgaatgtcaaaattactccttgatccatgggctgcaaaatggatgttgtattagcaggcatgaatacattaatctacttgtatttctccattggaggtcttgagtgactaagagtcttgtcaatgagcagtaatattttgaaaggaatcttttctttgaacagtaggtctcaacagtggggttaaaatattcagcaaaacatgctatagacagatgtgctatcatccaggctttgttgttctacttgtaaagcagaggcagagtagatttagcataattctcaagagctctaggatttttggaatagtaactgaacattaggttcaacttcaagttaccagatgcattagtccctaacaagagagtcagcctgtcttttgaagcttgaagccaggtgttgatttctcctccctggaacatggaagtggcaatgtgaaatttttctctatgcccatatggagtcctatatggcatcttcttccaatagaaggatggattgtctacattgaaagtctgttgttttctgtagccatcatcatcaatgatcttagctagatcttctggataatttgctgtagcttctacattagcatttccccttgcacttttttgttttatagagttttttttttccttaaacttcgtgagctaaccttcactagcaaatgtttcttctgcagtttcctcacctctttcacccttcatagaattgaagagagttagggccttatcctggattaggctttggcttaaggcaatattgttgctggtttgatcttctatccagaccattaaaattttcttcatatcagcaacattgctgttttgctttcttatcatttgtgtgttcactggagcagcacttttaatttgctctgagaaatttttctttgcattcactacttggttaactggtacaaaatacctagctttttggcctgtcttggctttcaatatgtcttcctcattatgcttaatcgcttctagcttttgatataaaatgagagatgtgcaacttttcctttcacttggacacttacagggttattacttggctaatgtcaagattgtgtctcagggaaaagggaggctatacgagagggagagagatgtaggaatggccagttggtagagcagtcagaacacatacaacattgattaagtttgctgtcatggctgggcgtggtggctcacgcctgtaatcccagtactttgggaggctgagtcaggtggatcacttgaggtcaggagttcgagaccagcctggccaacatggtgaaacccygtctttactaaaaatacaaaaattagctggcctggtagtgggtrcctgtaatctcagctacttgggaggctgaggcaggagaattgcttgaacccaggaggcaaaagttgcagtgagccaagattgcgccactgccctccagcctgggccacacagtgatactctatcgccaaaaaaaaaaaaaaaaaaaaaaagcttgctgtcatgtgggtgcaacttgtggtgccccaaagcaattacagtagtaacatcaaagatcgctgatcacaggtcaccacaacatatataattgtaatgaaaatatttgaaatattttgagaattactgaagtgtgacacagagacacgaagtgagcacgtgcagttggaaagtttgtgctgatagacttgctcgacgcaggtttgctgcaaaactccaattgtaaaaaaacaaaaaatgttattatctgtgaagagcagtaaaaggaagggcaatgaagtgaggtatgcctgtactagagtttgtttgtgtgtttctgcccaaatggttgaatgctgttctgattgtatttggcatcgagctaatcagagctgtcgtaaggggaactatggttttggagtttgttgtgcttggcaattctaaggaaagtagccattagagcagaagaaagtgaccttacaaactgatgctaaaaatatccccggtctacataaagaaaatacacacaaacctctcatagcctttcttaaagaaagagtagagttacctttcytagatatcaaacattcagtctctatactgtcctttggtgatgggatttttttctctgccaatctgcattcactgcttattttaaactttggaaatgagcaagcgagggctgagagtgaagaagctgaacacatagcaacatttatgtggttttgtgcaccatcaagtaacaaactgtagcttttggatctctggacatctacttttgcactgtaataaaataattctagggcacaatttcaagttataggacaatgatactctgtgagtttcaacaagaggggaaaatgaaaaaggatgtttttaagtgagggtagaaacactttcaaaatgaatgaaactctttgaattacagtgtactgtgacataaagaaacagttgtgggtcaacttcaaaattctggtgttttcatctctcggaatttcttggcagtgtctcccacttgaaggtttatagtgagtataatgtaccatttctactgatcaaagaaagttacttggtgtcaaaaagctacttgggaaccagcctgattactgggttatttcttaatgagttctggcacatggttctcatctttttaagagggaaaagtgtaactcggcagcaccaagtggaaacataagcattttggcaagtgtggagatgcagcacagctggataaaaactccctgctttgaaatctcgtatctcaaatgctacatccatttttaagcacattgcactgtcagttcaggtttcaatatgaacaggaactggggccattcaatgatatagtaataaatcaaagattgggatctattcactggattgcttgcgctctcttttttttcttcacaagtaatttgtgaggacaacaggtgagggacaatgaaggaggagaatatgatgcatgggtgttgcgctgtcggcggaaaccttggcaagcaggacacttaagacagtaatttatcctgtggcatgatcttcacctcctgaatcagcattcctctggttaatcaggggaacacaaggcactgatggtttttcttttaaaaatgccttttatttttattataaagtaatacctgcctataaaatgcaggaaataaaggaaaatttaattggtaaagatgttgcctactgcagctttcagctttccatctttgacacacaattgtccctgtaatccaatacaacttgaataaagacctcagtctcccaagcatacaatctagtccttcaatggcagtcaacaaacatacaacaagttgcataccctgagtcaggcactggactaggtgctgaaaatacaaagggaacacagatttggtccctgacacacaaatcttaatggagagtggaaaattatgagcaattaaactagtgactaagtctgggaaattactggatatctgaaggctgaatgaatctgtataaagactaaaagagaagaagtgtagaagtggcatgtgttttttctatgaacacatgtgttttctatgaatcttggcttcctcacctgtgaaatgaggaggttagaccagatggtttgctggatgatcaacttgtcccggcttgcttggtactttcccagtttcagcagtgaaatgtcctaggaatctttttagtctctgttttaaaactgaaagtcccttgtcctggagaccccaaagtcctgggaaaactaagagggttggccatcctatttatatggttatttctagttctcatattccatgattgtattttgagaaagagtacttkaagtttatgatatggccacagggtaagacaacttagattgaaatataagtacattagcagtactattattatgtttttaatcctaaagtgtgatttatttaaacacattttgggcaaaacaagctttgtgttctagcttatgacaaaaacattagtattgtatttttgggaaaataagttttattcttccaagaaaatatctcacaaataaatatttgcaagcactttgcagggtcacaaagttttatgcaagcagttatctttgttgtgattctcagttgtgtcctctaaaagtctggtgtagtggaaagagtactggctttgcagtcaggcaatttttgttcttttacttactgaccatgagagctggagaaaataactcctctgtgatacagtttcttcttttataaaatatgaataataatggctacctggtagggttgttaggagaatctgagtacatgggcatgtagaagtgctcaatgcagattttttttttatttctgtaaacagtttgctttctgttatacttaaagggatctggatgtgtttgggattcaagtgagagagatgatctttataggagtgtatcaacaaaatcttgactatgaatacatatatccgcaaatacacaagtatatacatatacaaatatatattcctcattaatattgcacaaaagagccaagccatgtcctaaatgttactactgaaaattaagatccaatctaggccatagagtcctgtaaaccccatttaaaatagggttgaaaatttgactattataatgaggtaaaaatggatttgacttgtccaatagccattaagtctaatgatttatttgtattttaaaacacaaaaaaaggactggatatttgcaggtggtaccttactgaatgctgatccataggttactctaacaagggtaattttacattttaaatagtaacatttaaagtcagaattcttaaatgtacaccaagaatgatggctaatgagtaataacagcttaagttaaaaagcttaacaataagttaattcttgtgtgcatttattacaaacactactgtgagaagtaatggctaaagtaaaaaagagggcagaaaaaaacatctgatgctataatgcgtctaaataaagaatgtgaaacataaagttttgttctacatcttcactggagattttaaagggcaaggagacctagctccttgagatgtataactatttgctgacaagttggagtgtcattagccagtgttctaraaagtgaataatataatccccccccccagctctacattgatacatttcttagctaggagacaaatgttagtttgtatttcgtagaccaaactattttaacatctccattttcatttgtctgtatagacaaaaatgtttggcctacaaagacacagccgtgaatattgaatgacccagttcagtatccattacctgaatgttgttgtgtccccactgtaygcaggggagatgtggtaggcatcgggatggatgatgacgatgatgataattaaatgagtgaacagacaaacaaacggcaggcatatttyctatcctcttagtgtttacagttttgctgcagaggaatgattttatgaaataacataagtaatttagctgagattatttaagcatgagtttttggaacattttcccccagaatcaaaaaagtagggtcagtgccaaagcagccagttccaaagcgatgctctaaaaccttagaagtttccttggagtaacaaaaaatttccaggaagtgaagcagtttataaatagtttcagatctttgtggaaatacacagagaaactggcagaaaatgaatccatggagattttgacaagacccctctaagcaagatctaaagacaacatcagatggagttgtctgtggattatgtacgtattgtcagagacattcatgcaaaataatgggtttggtggtgacagggttacagccacaacaagaaagtgagatacagttagtggaattctcaagtgctctcttaggatgaataaaccttaagaaagaacaccctgcttttrtaacagatgaagaaaggctatggaagagacagattctggtaagacagagcattctctaacactaaagatgacatttctgatctatgggcacgggctttcacatgggttaaatgggtgcagcaaatagtgtttcagctgtttttggattaaatgagttgttcaggatttgtagtgtaacgggcatccatggaaaacatttcagtattttagagagccgtaccttctatgtgtctcaacagtgttatttgagggctctctaggaaggcttcccttatctaattctctctcaaacttttgaataaaagtcctattattagcaattcctgtgtggtgaccatcatcatttccctttgtctctttttgaagatgaataattgcagagaatggaagtaccctttctccatcacaccttggatcagtgcttattagatcactttcctgattgatgacaaagatgggaaaacttgagaacacttctcagtatagaaggaggaggggtgaagagaggctgcagaaatggtgttagagtcctggatgacaacagtgctggcttatcaatgttttcagggcactgccgaatgaaacatgagatttgtatacaagaacttgagagctaagaaatgtttactttgcctaggaaatacccactgggatattgttaggatggaagtaatgaggaaataataatgatgataatatactttttaaattctctcagcattgttgaaaaatatgattataacattgcagtggtggacaacttatcaataccaacctccatggaaatctaggtcaaagaaaacgtaaccacagggccgaaaaaataaatccatgagatggcctttagcaaggtcacagaagaaaataatttccagccctgagaaccccgtgatttccttcttgtttcttttcatctttatccattctgtattccagtattttgtatctagtgttcttctcctaaccctatgcctttctcagtatggatattttcggtctaagacctgaggatattgccactgttttggtgattgcttttgcacttgtgtagcagcttttaaattcccatcttttttagcagctgcagccagacaaacatatgagtcagtgggaggggtttagaggaactggctcagttctcaagggagcagtaaccttttggcagtccaacaaaaagaacatttaaagtccagtgactgcaaaagctctctctgtacatgtgatagcaactgcagttttcccaaggtctactaagggttttttcaggaagagtcaggtttctgcctatagagagacacattcctgaaggcttaactctgacctcatagctcaagtggatacaaaataaaatctggagacagctgggaagtgataaagggcaaggaagaaatttggggatatgaaagtgacaatgttttattaaatgttctcactgggttttgttgcctgtataccctacagcgcaaataatgaaggacagctmatctttcttttttcagtaytagttcagggtacaggatctttctctctactgtgttcacataagagattctccaagaattgtttccctacctggtggtccttgagagcctcttagaggaatgggcattttcaactcaatccttttcacctgttcatcctcaagcagaggtccacaggctgggatgtgcctgtgtctgaaacttctactttaagcaactagttgctgatatttgactttttacaaaaatgccaatttgatcaacttaagaggaatacaaagataagagtggcttgttgatttctgcaggaaaccaataaatgattccttgtttctccgtttccttgcattgttcttccctgtacattattttctttcttctttattgcttatcataaaaagaagagtaagggggtcttatgtggaagggatgaataatagaaaattatttttgtgtcaagtagaaacaatagattcttttgctaatgaaaatttagacaatactttctgtgatacacattttgctgagataaaatgtcacaatcaagaagtccatttacactgaaataggcaacctaatagtatcttaattaacatagaagaaagtggtaattagaggtcatttggaaagctggagacggtgtcccaatgagactggcaagttttacttcatgactcaaggtacaagtctgggttcttagttgcaactaacagaaaacctctgtccaacataggcagaaaaatwatttgttggaaggatattgagtttcttacaaattggtgagaggactagagatcagatttagaaagagattggaaatcaagggacagtaaacagctgrggatccagctgagctcacaccattgaagcaggctgttgaggatcagtcactattcctgctgccatttcaagtgctgcttctggcaacacaccagtgtactgctggccactagcctctggcctctgcyatggggggccaagaatatctctgactcttccagcaacttggcatctctctctctcaagaatcaaaggtctactcaagagcatctaattgattgagcctaggtcacatgcctttttccaaacagctaagagtggtgcccaaggctgggtggagggttgaggggaaggagactgggaggtggcattttcatttccaactcgatttgatccatgtactcatcctccagcaatgataagaacccccttattttttttagcctgttggaggtaatgacatctacccttcttgtacttttgcagtacttcatatattggtcttactgtattgttctatttataatttatatgtgtgtttttccccacctgacagaatttatggagaagagggattgtgttgtgtttttagcatcataacctacagtgccttacatgcattaggtgcttaaaatatatgggtttartaaattatgtttaatgatgatgtcgcagggaaacctaatataatgctaataaatcatagcaacaaatgttgaaagagtacttgttatatactggacattttcttatttcatccttataacaatcctatgaagtaggttctatgctttttcattttatgcatgaggagctaaggctcaggttaaataagttgtccttgtttatataactgaaactgacagggcagatattctagctagggcggtcaaattccagagcccatcatcagaactgtactgccccctggaggtaaatcacagagaagaggaagatggatccaatcttagagaacagagaccactagtttgctatattctcaatagatgttcacttagagtgtatggtatttatttgataggaatcaaggaataattttatatttactgatataaatgaaatcttattttgaatttaatattgttctaaagtaataggcattgcatagtaacgactaaaaaagcattccttttttgcagcattctagttatgtttgcctcataatataataaatataaataaatatttattatgttatatattttatataaataaatatttattaataatataataaatattaataaaataaaaataaatataaataaatacatctaaatataaataaatccacatgaatatagaatattcatatgagaatctttaaattttgtatctcacatcaaaatttttttatttaattatctaaagtcataagacagaacttcatattttactccaaaacttaagaattttgattactttttcttttccatcaaagattttcttgcctaaatatgaataggcttatagtataaagtaacagtatcccatttttaaggcgtaaatgtatatatttttatttttaagctgagttgtatctgagaaagaacatatactttcatcagaaatgataaaaacgtagtttggggaactgttactacaaaagagcagcacgtctgactttcatgtactgtaagttcaaagagactgtttcatgctgagtaagcacaaaagaaggattggtccttggaaaacactgaaagcagctcttctctatgagacttaagaaaacagaatcaagtgaatctagaaagagttaccaatctgaatttaaaggtgattgcttgtatttttctaattaaaattttttttgtctttcaaaccaatattattttatttagttatttttaatttttaaattttattttaggtttggggtacatgtgtaggtttgttatacagaaaaattgcatatcactggagtttggtgtacagattatttcatcacacaggtaataagcatagcatccaataggtagtttttttattctctcccttctcctaccctcaagtaggcctggcgtctgctgttcccttctttgtgtccatgtgttctcaatgtttagctcccaattgtaagtaagaatatgcagtatttggttttctgtttctgtattagtttgcttaggataatggcctccagctccatttatcttgctgcaaaggacatgatctcattttttttatggctgcatagtattccatggtgtatatataccacattttctttatctgttctactgactgttgctgggtatttaggttgattctatgtctttgctattgtgaatagtgctgcagtgaacatatgtgttcatgtgtcttgatggtagaatgatttatattcctttgagtatatacccaattgggattgctgggttgagtgttaattctgttttaagttatttgagacatcactacaccgctttccacaatagttaaactaatttacattcccaccagcagtgtataagtgttcccttttatccacaaccttgccagcatttgttattttttgactttttaataatagccattctgactattcttattaataattcttattcttgttaataataattattatcacctagatggtatctcactgtggttttgatttgcatctccataatgattagtgatgttgtacgttttttcatatgctcactggctgtgtatatgtcttcttgagaagtgtctgttcatgtcttttgaccactttttaatgggttgtttgtcttttcttgttagtttgtttaaattccttataggttctggatattagacctttgttggatatataatttgcaaatattttctctcattctgtaccttgtctgtttactctgttgatagtttcatttgctgtgcagagtttctttagtttaattaggtcccatttgtcaatttttgtttttgttgtagttgcttttggcatgcttgtcatgaaatctttgccagggcctatgtacagaatggcatttcctaggttatcttccagggcttttatagttttaggttttacatttagtgtttaatccatcttgagctgatttttgtatatggtgtaaggaagtggtccagtttcaatcttcwgcatgtggctggccagttatcctgatctgcttgtatttggataacaagttgctaatgtgaaaagatatcgttatgtcattatttttttccygatatttgaggcattttcacagaaatatgcagaagtcatgccataatttttttatgcctktttgtatagttttggagtaaatttctaaaaggctaaatttctacatatggacttactcaaattataagtttcaagtaaatggacaaatattaagggcagatatagaagaacaattgattttgagtaggtttgtgggaaagattttgtaggtgatggaagattgagcatatttgtagtagagggaatagagttgtggtgaaggaaacagcaaaggtgtgagggaggcaggagatttgtttattaggctgcagattgttgaaaaaagtggaagaaaaatgatcaggttcaataaaggagagatgagtggtggaagccagagaagggagatacaaatatgaaaactttcaagctggggcatttccaagagatgataggctgcaaagtggctgaagtggatcatagttgtagttgtttgacattgagaaggtcaagaaaaatgtggtggcagatgaggagctgttgatttttgtcttaggtggctagagctattaaggaatttaggatgtgtcctggagctcaccagatgatggagataaagatgtaggaaagtgcataagggagcaagtgtgcctcagcagaggatgctcagggctggtgaagggcawttttttggcagcagcagtgtagaatatgcaacatgaactcctccaggccactgaattaagaggaatgcaagatagcagctcccacaggatagaaaactgggagtgagcatcatataggaaaattgagatgtccagtgcagtcaggagaatgtacatcttgttttggttgatatggtttggctgtgttcccacccaaatctcatcttgaactgcagctcccataattcccatgtgtcatgggagggacctggtgggaagcaactgaatcatgtggttaggtttttcccatgctgttctcatgatagtgaataagtctcatgagatctgatggtttcataaaggggagtttccctacatgagctctctcttgcttgccaccaggtagctgtccctttgctcttcatttgtcttccaccatgattgggaggcctcccctgccrtgtggaactgtgagtccattaaacctcttccctttataaattagccagtcttgggtatgtctttatcagcagtgtgagaacagactaatacattggttctgtctttaattactaacactgtcaatgagcactaacaatgtggtagacatcatgccggatattgggaattcagagatttaaaacaatgcaccattatgaaaagtgggtgcacgttgaatacmgctgaagttggctttcaaatctgacataatcaccaccagctctgtggccccactaaagttctcaacttccctgagacccagtttcttcatgtataaaataagaatactaataatttaccttttagggttgttttgaggataaaatataaagtaaataaaaagtctatcatagtgctacctgagagttgctattattattgttgtttgttattgttattttggtttctaatatgatcatctgttggcgcagatgtatgtaactaacaataagttggtagaaagacttaggttaaatcccccctgacaattttactttgggaactctggcattgggttaagatttaacgagctacagaggccaggaagttttgtcactgagatgaaatagggagatagatcacaggtggaggttagtaacaacactgcagtttgtgtagtgatcgtgggtgcagcctggaagtaaggtccatggtctgtcttgggaacacattggtagaagaagcaattgcatcagaaaccagagaaaccatctatctgggcttcagtttctcttttgttggaaaaatatacctccctgctcctgtttcatcattgtgaagattacatgagataatgtaagtgaaggtgctttgacaactgtgaagggtctatctatatcaggatgatatgtttatgaatatttgtgggcagaatttccagtggctgctgtttccaccatcctgatgagacatggagaaaacgttgtgctgttctctacaggagagtaaatccaagagttaaaaaaaaaattattgaaacatttgtgaatggtaagaaagaaaaattttgtagttctgaggagagagcttctctggtaacttctagtgttattcatcactagaaaatattttgcttagtaacaaatactgtaatawgatgaaatgtgacaattttctaagccattcttggattcttcaaaggaaaaaaaaacttccattgtttatttggaataatatcagaaaatagagctttcttgtctgctaatatttctattcagactcgtgtggctcttctctttaagcagccagccatcatagcacatgttcatccttccctttgcttgtctttttcctggttggagcgggttctcctaatttagttagctctttttacgtttggcctccaaatgatttgttgaaactacttttttttttgagatctagccaggctatacatggtgataataggtaaaatgaataagtagaagacattctccagaaaatactgcccattttaagaccagatgtaaaagatcaacattcataatgatcatagcataatgaatgtaatgatgtactgggtgctgttcctgaagttctgcatgtttcaacctgtttaaattcctcacaacaatactaaaagctgcttgttattgtgaccctattttaaatgtgaggggtttgaagtacagagaggtaaagttacctgctcaaggactctatctaatcggtagtgccagagttgggactggaacccagatagtatagctttaagcactaggatatgcctttttttttttttttttttcagttttgaaagactcacagaagaatgttaaaatggaaaaaatcaatcaatcaataaaagcgctggaaaggataatatatatatttattatattttagaataggaataggaacacttttttaaatttgaaagaggtaaatatagcacaataattgaaaatgtgtttgataaatttatgcaatttagtaacccaagaggtgattcatactggaaacctccactctttaaaaaaagttccagtgaaataaatgtacatttgggtatccttgctctttgggtatacgttctcactttttcaggcttatttcaggaccagtcattacgctcaccttttattattgaggtgctattgatagaaccatagtactgcactcagaaactgtttttttgtttgtttgtttgtttgtttgtttttgagacggagtctctctcttgtcacccaggctggagtgcagtggtgcgatctcagctcatgcaacctccgcctcccgggttcaagtgattctagtgcctcagcctcccaagtagctgggatgacaggcacccaccaccacacccagctaatttttgtatttttagttgagacggggtttcaccgtgttggccagtctggtctcgaactcctgacctcaagtgatccacctgccttggcctcccaaagtgcctggataagaggcatgagccaccatgcgtggccaactttttgttttttgtatacatatatttaaggtatacaacatgatgttttgatatatatagcaaatattgtacatagtgaaatgattactacagtcctgcaaagtaacatatccatctgtaggaaactttttatgctctgacttgtgagatcttgttaacttccttgtgtgggtttgactttaatctcacgtctgtgtcgccccagggaagtttctcctagcttttcaaaatcactttactagattctaaaaataactgccctccctttggcttgagagactaaattttgggtgtcacccatgcgacattaaatggagcaatgatattgtgactggcaagaggcaagaggcttgggtttccagtgatttctataatagctgaatttatagttacttataaagtactctaagaaggaacttttcattatgaagtcagcatgacagatttttggatttctaaatctgtctttgcaatattattctgtgctagtttgttgaaatgtgacactgcatctttcattcagagatatgagtactgacttggcatcacttgtagctgtgaatttttatgacatatccatttcatttgaaattatttaaaaggaatggactgggcatggtggctcacgcctgtaatcccagcactttgggaggccgaggcaggtggatcacctgaggtcaggagttcaggatcagcctgaccaacatggtaaaaccccgtctctactaaaaatacaaaaattagctgggtgtggtggtaggcacctgtaatcccagctactcaggaggctgagacaggagaatcacttgaacccgggaggtggaggttgcagtgaaccgagatcacgccatcgcactccagcctgtgtgacagggcaagcactcgtctcaaaaaaggattgctttattttttaagtgatttcatttgtttttggccaagtttctttttaaggtaagattgtacaattattatattaatagggccagaacaatggtgtattattattttgcaaaatattttagcaaaagaaagggccaaatgaagaaagtgatcattcagtaagcttgcagagacacacttacggtaaactcgctatgcagttactcctgtggtgctcctgctcttttgccagtaacgggaatttatttgattatatagtttagaaataccaaattatgcattccaaatcatgtttattgagatatgccatgtaagacaaatggcctggtgttttgtttagagcttggaagctgagatgttccagctacagttcggcgtttccctaggggacttgcggggaaatgggacagcctagttctcagcttctgtggctgtaagacgataatttccagctgctgtgggagttggactggtggcctggccccagggaaatatcctggtctcttggttacgtctcttgcaccctctggggctatatgctgcattctctcaggcacatttcatgctcacatgagaggaaaccatccttattggcactttaaggcatcaggaagcttttacaaatgttgtctctgacagcttcggaaggggcttttcagctgtccctgtgacccctgctaggctaaacatatgtttaaaacatgtggaggaatggtcaggtttagaggctctgctgttgctgctcagtattattcctggctctattttctgcatgacttgccaacattctcattgtgtggggcttgcagctgccacacagtcatacatactagtctcaatttggtgcttcagagctcccaaagattccaccacttctgccagaagtcctgccggttgttaccacccagaatgctttcaagttcggagacgaagctggggagactgcttctctctctctctcctctctctcatttaattacatacttcaagttcatggagaaaagctctgttaactgcctgtgtggtgtccaccacagggctctgtgcagaagagcgcttaatgaatggtgtagggtcacccaccgatgtttttctaagaatgtctgggttaacttcaatgcttctgtgaagcaggggattcttccattgtagtaatgcagatataaattgatcatgagtaggagatgtcgtaatatttgacagcttttcataaaaaagatctaccaggtctttttgaatgaacccttcaacttcctgccatctccagtctctaaatgtggcagtctagatttttttcagggtaaagtaaaatagtagacatgacatattttggttgtcccatgagatctcattaaagagtctgtagtatagttgatgctggcatttttgagttgcagcactgaggaaaggggagaaatgaggtttggaaggcaactaaaatgtttctcttctaggagctacattgggacctttataagcattttctcatttaatgctcgcaaagccctatgatctagtcatttcactcctattttaaaaatggaaaaactaggcctagagggctaagtatcataccctagaatacatatatggtaagtggtagaaaattttaaatccaagtgggtctgactcccaagataatgttcttttgcttgaatatagtaccccccccaaattagttcacatttacttttgttaagtgtataaatgtatacgtgttcatttttgaaggctatttacctgtgctgttatctaccaaagctattggccaaaattattatctactttacgagttataaatataaatttttgaggcttctttaagaaatgttctgtctgtatttgtgccaagtaagagctgcccccgaatatcatatacatcaggaggctatgaaatgacaccaaagcctgttactgcttgtggcattttagaaagttcttagaaattgctttcagaacagatttagaaaccattccttataaagtgcttgagaggagtcagtgttttctacaagagtacaagtaagaaaagacattctggatggcagcctggataagcatgttgggatcttccagaggggttggcatggctcaaatggagagtactggaaaatgatggacctggagcaacaagggaggtggtacagcactgtgattaagagaatgggcctgggagacaggagatttgggtgaacctcaaatctgtcacttggtagcttgtggctttaagcaattatttaatttatcagattctctatttcatcatgtttaagatggggataatgattccaccctctttctcacagattttttgaaaataaacaataaattgtgtttttagagctttagcacaatggcatgcagtaagcactgataaagtgtagctattatttcctacaactagcaacaaaatgtcttctatattttgctaaggggtttagatgtttttctgaggctttcataaacaatatgatcagcaagtgttttagcccattttatgttgctataacagaataccacagactggatagtttctaatgaacagaaatttatttggctcattgtcctagagtctgggaaatctaagagcatggcactggcgtatggtgatgatctttctgctgcaccgtcccataccagaaggcagaaaggcaagagaaagtgagagtaaaccagcaggagagggtcaaacttgccttttcaaaaaaatttttatgggtatatagtaggcgtatatatttatggggttcatgaaatattttggtacaggcatgcaatgtgtaataatcacatcatggaaaactggatatccaccccctcaaacatttatcctttgtgttacaaacaatccaattatactcttttagttactttaaaatgtacaattaaattattattggctatagtccccctgttgtgctatcaaaatactaggtcttactccttctttccttctttccttccttccttccttcttccttccttccttccttcatctctctctctctctttctctctttctttcttttttttgtcttgctctgtcacccaggctggagtgcagtggcacgatcttggctcactgcaacctccacctcccaggttcggtcttgctctgtcacccaggctggagtgcagtggcacgatcttggctcactgcaaactccacctcctgggttcaagcgattctcctacctcagcctcttgagtagctgcacctacacgcgcctgccaccatctctggcttatttttgtatttttagtagagacggggttttcaccacgttggccaggctggtctcaaactcctgacctcaagtgatccacctgcctcagcctcccaaagtgctgggattacaggcgtgagccaccgtgcctggcccattctttctattttttttgtacccattaatcatacccatctcctccactactactcttcccagcctctggtaaccattcttctattctctatctccatgagtagaacgtgcttttataacaatgtactctcatgataatgaacccactcttgcaaaacaacattaatccgttcatgagggcagagccctcatgaccttgtaatctcttgatggtcccacctcttaatatcatcacaataggaattaaatctcaacatgagtttgggagggggcattcacactatagcagtaagcaacatattaaattgatgtttttgcaaaatagtactgtggaagatgaattggaagattttgaaagtagacacagagcaagtttcagaaacaacataagaaattataagatactgcaggagcaaagaaaaaacaacaaataaaaaacataaaggagatcaagttgactgctcactcactggtggacatgagaaagcagaaatccctaattctgttggggtctagatgaatgggtggcaccagcttccacaaaaagaaatctaagagtaagcagattttagctaaaagtattatttttgagatgttggatttgtgatgcctttgaaagaggcaggtgacagcatgtgacctaatgcccatcaaccagaagaaagtctggtatatagaaagtgctcataaatatttcataaataaattggagaaaaaaagcctgggaaccatatatatggtgaaaaaaggcttagaagttaatgatattatccaagaagtttgaaaagaaatccagggctagacttgtgggggcccactaacacttaggggttgaggaaaagcagctcagagaagagatggagaaggaattaccaaagagtaagaagaaataaatgaaggtggtggtttgcgagttcaaggaagagttccaagtagaaaggagtcttctacaatgttcatttatagagaggagaagtgagatgcatactgaaaagaatccatactgatgatgagattagtcattttcatccttgtcaaaggacattcagtggcagtaggggcaaaaaatggcttaagagagttgaaaataattgtgggtgaagatgagggtatagcaaatggtgactgaatgtaactgttctttcagtgaacatagttgaccccattctctaatctgctactgtgcatattgatggttgggagggggcagagatcacctgaccaagttgaaaaacttcaaaatagtattttcaaaacgatgtagctattcttggtttataatttcagcccgatgtgaaagccactttcactgtaattttaaaaaaaatcagttaattctaatgatatcttttgggtgacaaaaacaaataaaataaacttatagctagttattacatttatattcaattttaaatgtaaaatggtaaatgaagttgataaattaatttttttattgcttaggttctaagcaataaaaagaaaatacaggttttttttttttattgcctgtgctctcagttttaaatctgaggacagaagttggttttcatcatctggggcaaaacacatgaagaactttagttttaaaaagtacagcttacattattcaagtttataatgacaatacacaaacagtcttggtacatataatgagccacatatttgtcttttawaaaacaattacctttatttacattagagatgatttcaaagctaaactgacatgctatttcatgaataatatctatctttatataaactgcaccctacatacaataatgagatcatttagtataaatttacaacttgtatattctgataaatgcaggaatttctaaatgtcatggaattgtcataagtaatatcttcactgaaattgcttatttgcaaagaaggtactctcctttattaatctactgaataatttatatgttttggaaatagtgtgttaatttctgtgaaaagtgataatgctatttattaggtccatttttctgagaataaatcaatcccttcttaatcagttgtctaatctgcaaacattgtaggtataaatcaagttacaaattaagttagacacagattgatctgacaattgccttcaagtgaaatagcctggacccaataaaattctctccactgatttctagaaatggcatttggtatagcctcatggtattaatgtgatggtcatggcctggcatttgtactcagctatggtagcagaatatgcttaaattgataagattagataaatagcattcttcagatgttctggatgacagcatatttaatgtaattgcatttgtctgccagtttctatgtgttagagcacaaaagattttgaaccatgcataattttgatagagaaattcaatccactttcttctataatataccacaaattataaattttcattgcaactattcaatcgcttgagaaaagaatgcatttcaaatcaggttccatgccaaatacctcatttatggagctatgctgcttaaaattggacaaattgattaccttactgaatattgaaaatattagttggaagcattaaaaccatctttattagctctagactctagtaatacatatacttgtgtaataaatattaagagctactaatataccagcttttaaagtgtgagaattctcatttgcttaattgtcagtatatgattatgcaggcctgagtgttgaaacatgactaaaacattgaagaatcctatcagctcctttgggcagataatacatatccccattagatagtctgatgagatactatgggcttcaaagcctgatcatagtggtgatttatgcctgtatgagtactcttattacaagatcatgaaaggctatgagatcactcactaactgataaccacaattcccttatgagctaaatggctagtatttatttttttgttgctttagtatctggttacttttcaagaggctaatattttaatcaattgcttttggccgcagtaactacataactggaatatgtaatactgaattgaactataatatttagaaattcattgatagttcactttaaaaaaaaccctcattttttcaaaagttttattgccaaccccatgcacgtttcccttacttttaaattttagatttaagtctgtagctttaccaaggtgttcggatttttgtcatgcagaatcacagagtcatgattgcaagtgatctttaaagtttcaggttctgactccaagcttgaatctcctcccgggcatctctgaattatgggcattggccaggaccatatatgtgttctctggtgtttgccctgagaaagccctgatttgtgtccctaccgaatgaatccagtgggggttattgcaaatattttcaagataaactttttagttaagagccagcttgaatggttatagttttatttttataccaaaaaataaaaatttctcttgaaatggccctaacatggctctaggaattaatagagtatgttgcttctactatttcagcacttttaatgactgatatgtttcctttagtcttccgtactccatggtaaatgattctaatttcttcaatcccaaagtattaacatggtttgcagaagtcaagaaggtcctcctcatcaaggtcttctgatgtttacagttgtcttaaattgttgtctccagagttgaacatgctggtgaaaaacaataatagctaacattttttttctaggctaaacactgtgctaagtggtttatatatgtattaggtattctttaaaattaaactctttattttaaggtaattaaagattttatcacatgcacttgtaagaagtaatgcagagtgatcctatgtaccctttactcagttttccccaatggtaacatcttgcaaactgtagtctgttatcataaccaggatatggacattgatgtagtttatccatcctattccgatctccctagttttatttgtactcctttgtgtatacaaaatattgtgttctatgccattttatctcatgtgtgtttgtgtatctaccactccagtcaagatagagagtatttccaccatcacaaagatccctggtgttacctttatgtgaacatatctacttcctctttgcttccccttcataacctcatccttagctcctggtaacccctaatcttttctttgtttctataattttgttgtttcatgaatgttatataaatggaatcatacagtatatatattttaggggactggcttttttcacaaagtagaattctctggatagtcatccaaattattgtgtgtatcaataattggtccctttttattgctgagaagtattccatggtatggatatgtaccacaatttgtataactattaacctgttgaaggacatctgggttgtttctagtttggggctattatgaacatgaataatggtgtacaaggttttgtgtgaatataaatttttgtttctctgagataaatgcccaagaatgcaattgctggtacatgtgataattacatacttagttcttaaagaaaccgccaaactgtttttcagagtttctgcaccagcaattataagtgatctagtttctctatatccttgccagcatttgatgttatgacttttttaaaaaaattatccattttgataggtatgtaatgatatcacactgtagtttttgatttgtatttctttaatggctaatgatttgaacattttttttcttgtgttgtcatctgtatatccttttcagtgaaatgtctgcacgtgtgtcttttttccatttctaattggattgtttgttgttttgttttgagagttcttcatatattctgaataccagtcctttgttggatgtgtgttttggaaaattttctcccagtctctagcttgtctttttattctcttaaaatggtctttcaaagagcaagaatgttaaattttgaatcggtccaatttatcagtttttcctcttatgggttgtgcttttggtatcaagtctgagaactctttgcctagctctagattcagatgattttctccattacgttggtttargttggggttcaatttttttgcttatgaatgtctaattgctccaaggccatttgttgaaaagtctacccttttcccactgaattgcttttgtaccactgtaaaaaaccaatagagtgtatttgtctccattctcaccagtatcatactttcttttgtacagacaggttggtagagtgatcattcccactttattctttgtcagtattattttagctattctaggacctgtgcatttccatataaattttagaataagcttgtcattgcatacgaacttcctcactgagatttttgataggaattgttttaaacctattgctacatagtgaatatttgtgacctccccaaattcgtatgttgaaacctaatccctaatgtgatagcattagaagcaggtgggacctgtgggaggggattaggtcatgatggtggaggccccatgggtgagatgggtgtctatatacaagaggccccagaggcttctcttgccccttatgccatgtgaagccacagtgagaagatgcctgtctatgaaccaggaagagagctcccagtcggctggcaccttgatcttggatttcccaacatccagaactgtgagaaataaatttctgttgttgataagccacctaatttatggtattctgttatagcagtctgaatggactgagggagaaattggtacttaggagtgagggtagtgctgttacaaataccaaaaagtatggatgtggctttggaagtgggtaatgggtagaggctggaagagttttgacatacattctagaaagagcctgcattgctatgaacagactattaaggatgattctggtaagggctcagaaagaaaagaggagagctttagagaaagcctcagtcttcctagagaatccctaaataatcctgaagagagtgttggtggaaatagatggtaaaggccattctgatgagatctcacatggaaatgaggaacatgttattgaataatggagtaaaggtcattcttgttataaagtgtcaaagaacttggttgaattgtgttcatgttctagtattttgtggaaggtataacttgtgagtgatgaaattgggtattttggttgaggaaattcctaagcaaagtgttgaaaagtgacctggtttttcctgaccatttatagtaaaatggaagaagagagaaatgacttaaaggcagaattgttaattaaaaagcaagcagaacataaaggtttgggagattcttagcctatttgtattgtaaaaatagagaaagcatgttcaagaaagaacacaaagggtatggccaaatgactgtttgataagatttgttagccctttaaacagaagtcaggagctgttcaagacaatggaagaatgaccctgaaggcagttcagagataatcagagctgccacccccatcacagtgtagaggccgctggcacatgtaggattgcagtgtgccctgcctggcgcctcctcacattgcagcctctgctgacttcactccagtgctcatggtatggagcagcttcacactcagctgcttcaggtatggctctggagggccctggtgtggtgtggctgctccacccagcaaagctgaggagccatgttgttcctacctagatttcaaaggatcaggcctcccagcagaggcacagggcccaggcagagaacagccatgggggtgggggccaaggtacagagctgctgggtgtgacagggccacctaaacccaaaggagcagtgctacatggagccttggggtccccctacctggcaaagctttgtgggcaggaccactgttcaagtgtgtctattgggcaggacctctgcttcagtgggccttgagggtacagcatacagccaaagaagattattctcaagctttaaggtctaatggaattagctccactgggttttggacttgagacctgtcactacttcttgccgattgctccctttggaataggaatgcctattctatgcctgtcccaccactgcattttggaagcacataaaatgttggtttcacaggttcacaagtggagagaagtttgcctaggatgaattagaccttttatctcttccatatctaatttaggtgatattttggtgagactttggacttagactttaaatttgtagctgagataagttttgacttttggggctattagggtggaaaaaatgtattttgcacatgagaaaaacatgaattttggggaagggggtcaaaggcagaatgccacagactgtatgtttatgtccctccaaaatttatatgttgaaatcagatccttaatgtgatgatatttggcagtagggcctttgggaaatggttagcttatgaaggtagagccctcatgaatgggattagttctcttataaaagagactttatagacttccctctccccttctaccatgtgagaacatcgcaaaaagatggttgtctatgaactaggaagtgggtcctcattaaacaacagatctgccagcaccttgatcttggaactccttgtctttagaactgtgagaaatacatttctattgttgataaggtttccagtctatggtgttttgttgtagcagctggaatggactaagacacctataaatcaattgagggagaactgacatctttactatgttaaatctttcaaactgtgaacgcagtatgtatatccttttatgtagatctttggtttctttcatcagcacttaataattttctgcatacagatcttgtgcatgttttgataaaattgataaaattatacctgattattttagtttctttggaatgattgtaaaggtacatctttggaatgattgttagctgtaggttttttgtgggtgttctttatcaaataaaggtagtaccactctattcctaacttgctgagaggtattttttgtctctttttggtcaaatgctttttatacatcaactgatatgaacatgtaatttttcatctttaggtattagtatgggggattgcattcattaattttcaaatgttgaaacaaccttttatacctggaataagcctcagttcgtcatggtgtttagttctttttatatattactcaatttgataattttttttttgcttatattgttgggggtttttacatgtaaattttatgagtgatattagtctatagtttttaggttaatcctatctttgtatgattttgatattcagataatacttcataaatgagcttagaagtgttccctactttctggaagagattatgcagaattgatgttaattattctttaagcacttggtagtattttccagtggaaccatttagcctagagatttcttttttggaagttttaagttatggattcaatttctttaatggttatagcgctattcacttcttcatcataatcaagatttggcagtttgtggtgttcatggaattgttacattttttctaagttgttgaatttatgagcattactttgtagtattcctttatcagtttttaaatggctgcagtatctgttgtggtattttctgtttcattgtttatattgctaactttttcttctcttttttaaaaatatattcagtcttgctagaggtttgccaattttattaatttttttgaacaagcagcttttgatttcattgattttctctattgtttttctgttttcaattttattcatttctgttcatatatttacygttttccttttgcttgctttgggtttagtttgcaattttctttttctagttttttgaggtagcatcttaggttattaaattgagatcttttcccacatgaacatttagcattatcaatgttcctctcaataatactttagctgaacccatatattttgatctattgtatcttcattttcattcagttatttttgaattgttctgtttatcattatgtaatatccgtttttgcccctagtaattttctgtgaattttccttgatctgagtggtactttatcaggtattaatacagcttctttttttattgcatggtatataattttccatccttttattttcaatctacctttattgttgaatttgaggtgactttcatgtaaatagcatagagttagaatgtatttttctatccacgtttccaatctctgccttttaattgatgattttagatagtttacattttaggtaattattaatattttagggcataagtctgtcattttattagttattttctatttgttacctctgtttcttttttatgtttctttttgccttcttttgggttatttgaacatttcttaggcttccatcttgattgatttatgttgtttttagtgtattttttgtatatatttcttagtggttcctttgtatattataatatacatatgtttcttatcacagtgttatcaacattttactacttctaatgaagtgtttaccttactgctgtttaaattcctttatgttttctgcttttaaataccatcgtattaagtatcagatagcattataatttttttcaatagtcaatatgatttataaaattcatgggagttagtttattttatgtactcatatttgtgttctttcagtgactctttttccttcctgatgctccaagattatattttccttattgtttttcccaacagtttaataagccacacttgagtttttctccaaggtaaggttaaacctcatagtttctggaaccactgtacctattaaaatttttttcttatattctctgtattctgtcacttgaaatctttaaaaactacatgaattctgtatctcatgcttggaatataatatatgactatggagacttgcatcatttaaataattttgatatactctttttttttgagacagagtctcactctgtctcccaggctggagtgcagtggcatgctgcaacctctgccttccaggttcaagtggttctcctgcctcagcctcccaattagctgggattatagatgtgtatcatcatgcctgggtaatttttgtatttttagtagagacagtttcagcatcttggtcaggctggtctcaaactcctgacctcaagtgatctgcctgcctcagcctcccaaagtgctgggattacaggcatgagccactgtgcccagccaattttgatatactcttatcttattgtgtacatttctccctttctttaaccgttccatactgttgttctttccaatagtgttttacagggatttcaatattatcattcatttcgttttatcattttttaatcatttttttttctgtttgaggaatttcttttagctgttctttaagggaatgtgtactatcagcaaattagtttatctttctatgggaatttctttatttcttctttgtttctggagaatagtttcactgattctaaaatacatagttgactatgcttttagcacttgaaaaacattgcaccatattttttctggcctccatggtttcagatgaaaaatctgtcattcaaactggttttccctatacacaatgtactgtttctctctggttgttttttaaatattttgtctttatttttcagaagtttaattataatgtccttgaattgaatttattttgttttatcatatttgagatttgctcagatttttgcatctgtgtacatatgtcctttgccaaaattgggaccctttcagtcatttcttcaagcaccttttcagcttcaatctcttttctccttttgagaatctaatgatatgagttggatcttttgctaattgtctctcaggttcctgaggcacttttcactttttaagatcagctttctctcttttgttcagattgtataaattctgtcgatcactgagtctgtcccttgtcatcttcactgtactatcaagctcatttagtgagctttttcccactagttattgtacttctcagttctattatttccatttggttattattatttacaaattctgctatatactccagacttcctgttttttcatttgttttaagaaatttgtaattgcttgttgaagtatttttaaatcacttttacagttttgtattccatatattcaattcatcattgttccttctcttttttaaaaattgtactttgttgaggtatttttatgatggctgctttaaaatcgttgtccgataattgcagcttctaattcatcttgctgttgatgtgagttgattgctttttttttcattcaagctgtgatttttctggttcttcatataaggagtgatttttaaaattgtattatggacagtttggttacgatgttaggaggctttggttcctatttaaatcttgattttagcaggccaggcagtcatcacttttaggtttagtctttaggtcctggcctacttttgttgattgcagttccagtagaagtttaattttaagagctcttgtggtgctgttttcatctgtttggtgtctggtgatgcctgagctctcatgcattccttctggtgctgcctgagggaggtcaaggaacttacccagtccaggctttctggtgactctaactaggagaaggaattctatggggatgacaagtacttcctaggcagactttgtgtctgtgtgtgtgttcgtactgcctaggaaaaaggattttctggcccataaagagcaagaggcttcctaagctaggccactggacttgatgtgattcctctttgctggtgctgtacgacaaccctcagtaagagagcatagtctcaggcccagcagagaaggagtgctttctgtgtccttttattgtccttgggatttctgatcaatctgccaatactgctaggctcatctaatattgtcgttgggactcgcattaggactggggaaaaaaaaagatcctatgtgggttaccttctgttgatagaatggatgttgaaaatgcccggcctgggttaccttcttctgttgagttagaggtcatgaaaaagccaactgttgtgttcttccagacctggagtccttaatcagtctatcttcccctttccatatttcagtgttctcttttaacgccttcttgcattatttcctgggtttatatttgtatttagtgaggatgagcaaagagaaacaagtttatgccatgttgtctactctgcactatatatatgttaattataggaactactctttgacataggaatagttgccttcctgccgctgcctggcacataagacacttttcttcagtaattggtgttacacctgtcaaaatgttttgaaaattataaaaggggattttattattatattaatttatagtctagtaaaatctaaagtcatacatttgggaagattatatttcatgtatttttccagtgactatactttccttctcattttccccaatagtttaataagccacacttgagattttctctaaggtaaggttaaacctcatagtttctggaaccattatacctgtttaagaaatttacttaggttctatatattccatcatttcagatctttaaaaactacatgaattctgtgtctcatgctttgggatataatatatgaatatggagactggcatcatttaaataatttagatatagtcttatcttgttgtgtacattttcccctttttttaaccattccattcagttattctttctgatagtgttttacagggatttcaatactatcattgatttcattggtgaaaatgggaaaaaagtaagagttgaatagatctgtggtctttgtcatttgttaacaatatactactttctccccaaagggacttatttatctttaagacctccatttgttctaaatggaagtcttgttctttactatattctctatcatttttcctttgatgtttactccaaaacttcttctttctaggtcacacagttcttactagttctcctaagtagagaaaattgtgttgtcattatgtaaggaaaatggttagttttttctcaaatgtgaaagtgatattattgcatgtaggtgctacatggtattatgtgctgttcgtcatatacagtgataaaaatgatctattatcgcatcagaatgaaatccttttggatggcttttttttggtgttgatgaatcttgtttttatttgtctgtatgatttcatcttttttctcctttgtaatcaaggacatgtttttgaggtaactgtcagggataagggtacaattagaatatgacaactaatcatatgagatttgaacccggacattagcctcaaagcactgtttggattgagctatctatctgacactatcattaatgacactatgcagaatttttgtcaactgagttaagaagttgctttttgccttacataaaggttatttcagtttctgaggatatactcaatattttgttctaactattcactcttaggaatacatggkcatgaaagggatattcactacctaaagatgaatgacttattcagatgaaacttattttataggttactcttatttttagacaaactctatggcccaaggttatttctcatccttatttttcatgtaaacaaatatacctcctctatttttaatgtttatctccttccatttctctagccagtaatcctagatgtgaggaattatcttaccctcggaccaaaggaggcagcagatgccatagctaagtacatggttttgtagtcagaatgtatccaaactccacaacttagtggcttagctttgtgaacttgggcaagtaaattaaattcggcatacctcagaacaaattggcaagataatagtctatttttcaggttttcaatatttaaaattaatttaattatagttgtgttttatctggtgtgggtcccatcctatgggccttatccagtgatatccgttttttcttccttgttccttcttgataaaattcacatagtataaaattcaccattttaaatgcacaatattattgaattcagtrtagtcataaggttatacaaccatcatcattatcaaattctaaaacatccttatcatccaaaagagaaaccttgtgcccattagcatgcactcactatttcccgcttcccactaatacaccttctgtctctatggatttgccttttctcgatattttgtataacagaatcataaagcatatggccttttatgtctggcttctttcacttagcataatattaaaatgttcatccatgttgtagcagtatttcacttttttttgctgaataatattctgttgtatggatatgcctatttgaattatccatttatcagttcatggatatttggatggctttcacattttggctttatgatgatatgaacattcatgtataaatttttgtgtgaataggtttcagttctctcagttatgtacctgcaaggggaattactgggtcacaaggtaactctgtgtttctacatttgtttaactttttgaggaactgccaaaatgtttttcaaagttattatactattttacactcccactagcagtgtatgagagtttaaatttctttctacatccttgctacctaacacttgtcatgttttttatttttgtatttgagaacagtcatctttgtgggtgtgaagtggtacctcatatctcattggtgtttaatttggatttctgtgaccataaaagatgttgagcatcttttcatgggcccattgtccatttgagtatcttctttagagaaatgttcattcaagccctttgtccatttttcaaaattgggttatttaccattttaatgatgaatttaagagtttctaaaaattcttgatattagactctgatcacatcaatcatttgcaaatattatcttgaattctgtggattgtatttttactctgttgatgttgttctttgaagcacaatgtgttttaattttctgaagttcaatagaaagtaaaactagattatttttactttagtttcttgtgttttaggtgtcatatgtaggaaaatattgcctaattcaaggtcgtgaagatttacttcttctaagagtgtttaggttttagctcttatattyaggtctatgatccatttgagttaaaatttttatatggtttgaggtggggggtccaatttctttttagtattggtagctagttttcttagaaccatttgtcgaatacttattttactagtaaattatcttggcatccttgccaaaaaccaattgtccatcaaggtataagtttatttttggatgctcagttccactttactgacctatatgcctattcttatgtcagtactatagctttgcaatacattttgaaatgaatttttatgatttttttgggtattctagatgtttttcattttttaaagatccacttgtcaatttctgcaaaaagctagctggaattttgagagggattgcactgaagctgataataatttggggagtattgtcatcttaacaatatttagttttccaatccatgaatataggatgtctttccatttacttaggttttctttaatttctttcaacgatgtattgtacttttcagtgcacaagtcttgaccttttgttagattcattctaagtatcttgttgatgctattttaaatagaattttttttgaattttatttttgaactgttcattgctagtgtatagacataaaattgatttttatatattgatcttgtatcctacaaccttgctgaactcatttatcagctttaactttttaagtgaattccttaggatcttctataaataatatcatgtaacctgcatacagtgatagttttatttctttctaatctggatgccttttatttcttttttaattatctaattttctctgtatagagcctctagtataatgttaatagatgctatgtgagtggacatccttggcttgtccctgattttagaaggaaggctttcagtcttctaccattaaatataatattctttgtggggctttgtagatgtcctttatcaggtgaaggagattcctatctattcctagtttgttgagttttttttttaatcatgaaaagattggagattttagcagatttttctgtgtctattaagataatatgtgttttttgtcctttattagtatgatatattgcactgatgattttcacatattgaatcaaccttgtattcctgggataaatctgactttgtcatggtgtataatccattttatttgttgctgtatttggttgctaatattttgttgagaaatttttcatctatatttgtaagggaaagtagtctacatttatataagggaaagtagtataagggaaagtgtaagtgtgtatgtatgtgtatgtgtggtttctttgtctggttttagtgtcatacaaaattatcctcacagaatgagttgagaagtactccctcctcttctattgtttggaagagtttgtgaaagattggtgttaacttttaaacatttggtagagtccatcagtgacattgattctggactcttctttgtgagttattattattattattattactaatttaatctctttacctgttacaagtctattcagattttctattgcttcttaagccagttgtagtagtatacatctaggaatttctctatctcatctaggttatttaatttcttggcatgtaatttcttggcatgtgatatggtttggttctgtgtccccccccaaatctcatctttaattgtaatcctcatgggttgtgggtggggcctgatgggaggtgattgaatcatggggaaagacttcctccttgctgttctggtgacagtaagtgagttctcatgagatctggttgtttgaaagtgtgtggcactttccccttctctggacttctctttcctgctccaccatggtaagatgtgcttgcttccccttcactttctgccatgattgtaagtttctggaagcctcccaatcatgcttcctgttaagcctgtggaactgtgaatcaattaaaccttttttcttcataaattgccccatctcaggtagttcttttatagcagtgtaaaaacggacgaatacagaaaattagtaccaggaaagtagggcactgctataaagataacctgaaagtgtggaagtgactttggaactgaaaaacaggcagagagtggaacagtttagagggctcagaagacgacacgatgatgagggaaagtttggaacttcctagagaattgttgaatggttttgaccaaaatgctgatagtgatatagacaatgaagttcaggcttaggcggtctcagatagagatgaggaacttattgggaactggagcaaaagttactcttcttatcctttaccaaagagactggtggcattgtgtccctgctctagggatctgtggaactttgaactctagagagatgatttagggtatctggtagaagaaatttacatctgggtaagcagcaaagcattcaagatgtagcctggctgctcctaacaggatacagtcatatgcattcacaaagaggtggtctgaaattggaacttatgtttaaaaaagaagcagagcagaaaagtttggaaaatttgcaacctgaccatgtggtagaaaagaaacacccattttctgagtagaaattcaagccggctgcagaaatttgcatgagtaaagagaagtcaaataatagtggccaagacaatggggaaaatgtctctagggcatgtcagagaccttcacagaagcctctcccatcacagggcctggggcttaagaagaaaaaaaatggttttgtggcccaggcccagggcccagctgctctatacaggcttaggacacggtgcactgtgtcccagctcctccagctccagctgtggctaaaaggggccaaggtacagctcaggctgtggctttggaggatgtaaaccccaagccttggctgcttccatgtggtgttgggcctgtgatgtgcacatgacaagagtttgggaacctctgcctagatttcagaggatgtatggaattgcctagatatccaagcagaagtctgctgcaggggcagggccttcatggagaacctttactagggcagtgcagaggggaaatgtggggttggagcctccatacagagtccccactggggcactgcctagtggagctctaagaagatggccactatgctccagtccccagaatggtagatccactgacagcttgcattgtgcacctggaaaagctgtaggtactcaatggccattcaagaaagaatccacaggggctgtaccctccagagccatagagggggagctgcccaagaccatgggaatccacctgttccatcagcatgccctggatgtgacacacggaatcaaagtagattattttggagcttttagatttaatgactgctttgctgggtttcagacttgcatggggcctgtaggccctttgttttggccaatttctcctatttggaatgggagcatttacccaatgcctgcaccccaattgaatcttggaagtaacaaacttgtttttgattttacagggtcataggcggaagggacttgccttgtctcagatgagattttggacttttgacttttagattaatgccaaattgagttaagactttgggggactgttgggaaggcatgattgtgttttgaaatgtgaaaaggacatgagattttggaggggccaggggcagaatgatatggtttggctcagtgtctccacccaaatctcatctcgaattgtaatccccacatgtcaggggaggggactggtgggaggtgctttaatcatgggagatgacttccctttattagtctgtttttacactgctataaagaacttacctgagactgggtaatttataaagagaagaggtttaattgactcacagttctgcattgctgggggagcctcaggagacttacatcatggtggaaggggaaacagacaccttcttcaaaagatggcaacagagagagcaagagagagtgtgtgtgaagcaggaactgtcaaacacttataaaagcatcatatcttgtgagaactcactcactatcctgagaatggcctgggggaaaccacccccatgatacaatcacctcccaccttgtccctccctcaacacctggagattttggagattacaatttgagatgagatttgggtggggacacagagccaaaccatattatttcattcctggcccctcccaaatctcatgtgttcacatttcaaaacacaatcatgccttcccaacagtcccccaaagttttaagtcatttcagcattaacctaaaactcaaaagttcaaaatctcatctcagacaagttcattacttccaagatacaattggatacattctcttattccaaatgagtgwaattggccaaaacaaaggggccacagtccccatgcaagtccaaaacccaacagggcagtcattaaaattaaaagctctgaaaggatcttgtttgactacatgtctcacatccagggcacactgatgcaaggggtgggctcccatggtcttgggcagctctgcccctgtggctttgcagggtataatccctctcctggatgctttcatgggctggcattgagtgcctgcagctttcccaagtgtagggtgcaagctgtcagtgaacctatcattctkgggtctggaggatggtggctgtatctcacagctctactaggcagtgctacagtggggactctttgtgggggttccaaactcatattttccttccacactgccctagcagaggttctccatgagggctccacccctgcagcagactttttcctggacatccaggcatttccatccatcctctgaaatctagtcagaggtccctaaacctcaattcttgacttctctgcaccttcaggcccaacaccacatggaagaagccaaggcttagggcttgcattctctgaagccatggtctgaactgtatcttggccccttttagccacagctggagttggagcacctgggatccaggtcaccaagtcccaaggctacacacagcagcggggctctgggcttggttcatgaaactatttctttttcctaggactcagggcctgtgatgggagggcctgctgttaagatctctgactggtcctggagacattttcttctttgtcttggctattaaccttgggcttctcattacttatgcaaatatctacagctggcttgaatttctccccagaaaatgagtttttcttttctattgcattgtcaggctgcaaattttccaaacttttgtgctttgcttcccttttaaacatgtttcaatttccgatcatctctcttaaatttaaaattccagagatctttagggcaggggcaaaatgctttcagtctctttgctaaagcatagcaagagtgacctttgctccagttcccaagaagttccttatctccatctaagaccacttcagcctggacttccttgtccacatcattatcagcattttggtcaaaaccattcaacaagcctctaggaagttccaaactttcccacatctttttaattttttttctgaatgcttcaaaccgttccaatctctgcctattacccagttccaatgtcacttccacattttccagttacctttatagcagtaccccactctccatggtactaatttactgtattagttcgttttcacactgctataaagatactacttatatctgggtagtttataaacaaaggaggtttgactcacaacagatctgcatggcttaacagaaagcatgattggaaggcctcaggaaactcacaatcatggtgtaaggtaaaggtgaggcaaataattcttaccatggtggagcaggagagagagacctagggaaggggtaagtgccacacacattcaaacaaccagatctcatgagaactcactcactatcacagaaacagcaagggggaatgatatggtttggctctgtgtccctactgaaatctcatcttgaattgcaatccccctaatccccacgtgtcaagggagggacttgatgggaggtggtttgatcatgggaacagtttccattatgctgttctgatagtttttagtgtcaggagtgattttgtgggccaggcccagaccctattgctgtgtgcatcctcaggacttggtgtcctgtgtcccaactgcttcagctccagctgtggctaaaaggggtgaagatgtagttcaggccattgcttcagagggtgtaagccccaccccttggtggcttccacagggtgttggaaccgcaggtgcacagaagtgaagaattgaggtttgggaacctccatctagatttcacctctctccaggtccctcctgaagagtgtttcatttgcagttgagaaaaatatatattctgttgtatggaatgttcaatagatatcttctaggtctagttggcttatggtgttgttcacgtcttttattttcttgttgcggttctttctagttgttctattcattattgaaaatggggtcttaaagttttctactattatcattgatatttctctaattgtcactttttccttcttaaattgggggctctgttgttaagtgcatatgtatttataaatgttatatcttcttgattttgtcactgtaaacatccttcttttatctggtaaccatttttgtcttaaagactattttgtctgatattagcatatccactctacctctcttttggttactgttttcctggtatatattgtattgtacttttactttactaatttttgtctagtatgcagtatgtagttgggttatggttttgcatctattttgccaagtccaattaaaagtccaattaaattataaaattactactggtgagtaaatttgcatagtccactattttatatagacatttgtacatttatttcctcaggataaatttctataagtgtaattattactttaaagtaaatgtctgatttttattttgattttttttcatttttttttttggggggagctgacccttcaattttagaccacttttctatggtacactctaacaggtaatcaagacttatggcaacattgcccaaagagttaatggaaaatatggttttcacaatgataaaatcttccttgagtaacccaattctgagataggaatctttcctaagtgtccccgcagtatgacatacttcttctattatgatcactgtttattggtcagtatcccttgatagactataagctcagtgatgtctggtgctgctgccttgaattgtattttacctgtaattcccagtgtctgcctcagtgctttgtgcatagcacatacttgattaaaataattaaattgaagagcagaagaaataaatttcaaagaattttgtaagtacctccaaataattcaaggtacctaaagtaggacaggtactactctcattcaacttctatcctttcattatttgaagctctctttattctttttttaaacttttgttttaagttcagtggtacaaattcaggtttgttacgtaagtaaacttgtgtcatgggggtatgttatacagattatttcatcacccagttattaagcctagtacccattggttgattttttttattatctccttccttccaccctccaccctctgaaaggccccattgtgtgttgttcccctctatgtgtccatgtgttctcatcacctagcttccacatataagtgagaacatgcaatatttggttttctgttcctgtgttactatgctaaggatactggcctccagcttcatccatgtccctgcaaaggacatgctcttgttctttttttatggttgcatagtattccatggtgtatatgtaccatattttgttcatctagtctatcactgatgggtatttaggttgattccatgtctttgttattatgaataacactgcagtgaacatatgtgtgcatgtgtcttcataatagaatgatttatattcctttgggtatatacctagtaatgggattgctgaatcgaatgatatttctgtctttaggtctttgaggaattgccacactgtcttccataactgctgaactaattttcactcctaccaacagtgtataagcattcctttttctccacaaccttaccagcatctgctgttgtttgacttcttaatagtaaccattttcactcatgagagatgttatctcattgtggttttgatttgcatttctctaatgagaagtgatgttgagctttttttcatacgctgctggctacatatatgtcttcttttcagaagtgtctattcatgttctttgcccactttttttatgggggctgttttttatcttgtaaatttgttctttatagatgctggatattagacctttgtctaaggcatagttggcaaaaatattctcccattctgtaggttgtctgtttcctctgttgatagcttattttgctgtgcacaagctctttagtttagatctcatttgtcagtttttgcttatgttgcaattgtttttggtgtctgtcatgaaatctttgcctatgcctatgtcctgaagttattgcctacattgccttccagggtttttatagttttgggctttacgttttaatatttaacccatcttgagttaatttttgtatattattgtatcagtccattctcacactgctataaggatactacccaagactgggtaatttataaacaaaagaggtttaattgactcacagttttgcatggctggggaggcctcaggaaacttacaagtatggtggaaggtgaaggggaaagaagcgccttcttcacaaggtggcaggagagagagatcacaggggagactgccagtcacttaccaaaaagatttcgtgagagctccctcactatcatgagaacatcatggaggaaactgcccccatgatccaatcaccttctacaaggtccctcactgaacatatggggattacaattttggattacaacttgagatgagatttgggaagagatacagccaaaccatatgattttgtccatgcctcctcccaaatctcatgtccttttcatatttcaaaaccaaatatgccttcccaacactttctcaaagtcttaaatcattccagcattaactcaaaagtccaagttcaaagtttcatctgagaaaaggcaagtcccttctgcctgtgagcctgtaaaatcaaaaacaagttagttacttccaagatagaatgggagtgcagacattggataaatgttcccattccaagtgggagaaattggccaaaacaaagagccagatgccccatgcaagtccaaaaccaggccaggcagtcattaaatcttaaaggttcaaaataatctactttgactccatgtctcacatctggggcatgctgatgcaagggatgggctcccacagccttgggaagctccaccctggtggctctgcagggtatagcccctgtggctgctttcacagcctgccattgagtgcctgtagcttttccaagtgtatggtgcaagctgttggtcgatctgtcattctggggtctggagggtggtgggcctcttctcatagctccactaggcagtgccatagtgaggactctatatgtgggctccaaccccacatttaccctctgtattaccctagtagaagttctccatgagggttctgcccctgtagcagacttctgcctggaaatccaggtatttccatccattcagtgaaatctaggtggaggtttcaaagatcaacttttgtgttttttatacccataggcccagcaccatgtggaagaagccaaggcttgggacttgcaccctctgaagaaatggctcgagtggtaccttggtcccttttagccatagttagagctggagcagctcggacacagggcaccaagtcccaaagctacacagagcagctgggccctgggcctggccagtgaaaccatttttccctcctatgcctttgggcctgtgatgggaggggttggtgtgaaggtctctgatatgccctggtgacgttttccccatggtcttggctattaacattcagttcctcattacttatgcaaaattctgcagccagcttgaattcgtccacagaaaatgggtttttcttttctaccacatggtcaggctgcaaattttccaaacctttatgctctgcttcttttttaaacataagttccaatttcagaggatctctttgtgaacacatatagctgaacactttcagaataagccaggtcacagcttaaatgccttgctgcttagaaatttctcctgccagatactctaaatcatctctttcaagttcaaaattttacagatctctagggcaggggcaaaaggcccctagtctctttgctaaagcatacgatgagtgaccttttctccagttcccaatgagttcstcatctctatctgagaccacctctgcctggtcttcgttgtccatgtcactatcagcattttggtcaaaactattcaacaagtctctagaaagttccaaactttcccacatctttctttttctgacccatccaaactgttccagcctctgcctgtttcccagttccaaagtcactccacatttttgtgttatctttatagcagtaccccattgtgcttgtaccaattatctgtattagttcatactcacaatgctgtgatactacctgagactgggtaattcataaacaaaagaggtttaattgactcaaagttccacatggcttgtgaggcctcagaaagcttacaatcatggcagaaggtgaaggggaagcaagcactttcttcacaaggtggcaggagagagagagaacacaggggaaacttatcaaacaaccagatctcatgagagttccctcactattatgagaacagcatgggagaaactgcctccaggatccaatcaccttgtaccaggtccttcccttgacacatagggattacaattcagattacaatttgagatgagatttgggtggggacatagccaaaccttatcaaagatgtaagtaagtggtccagtttcagtcttctgcatatggctagccatttatcacagcaccatttattgaatatggaattctttctccattgcttgttttttttttcttcaggttttcaaagatcagatagttgttggtgtgtagtcttatttctgggttctgtagtctgttccattggtctatgtgtctgttcttgtaccagtaccatgctgttttcattactgttgctctgcagtatagtttgaagtcaggtagcatgatgcctctagctttgttcttgttgcttaggattgccttggctatttgggctcctttttggttccatatgaatattaaaataggtttttctagttctgtgaagaatatcaatggtagtttaatgggaatagcattgaatctgtaaatttctttgggcagtatggccattttaatgatattgattctttctatccgtgagcatggaatgtttttccatttgtttgtgtcattgctgatttctttgagcagtggtttgtagttctcctttagagatctttcacctccctagttagctgcattcctaggtattttattcttttttgtggcagttgtcaatgggagtttgtggtttggctttcagcttgactgttgttggtgtataggaatgctagctatttttttttttttttaaatggagtctcacactgtcacccaggctggagtggaatggtgttatcttggctcactgcaacctccacctcttgggttcaagcaattcttctgcctcagcctcccgagtagctgggattacaggcacccaccaccatgcctggctaattttttatatttttagtagagacaaggtttcactatgttggccaggatgatcttgaactcctgacctcataatccgcccaccttggcctcccaaagtgctgggattacaggcatgagccaccgagcctggctgaatgctagctatttttgcacgttgattttgtatcctgagactttgctgaagttgcttatcagcataagaagctttggggctgagacgatggggttttctagatatagggtaacgccatctgcaaacagggataatttgatgtattagctcgttctcacactgccataaagaactacttgagactgggtaatttatgaagaaaacaggtttaatcagcttatgattctgtgggctgtacagagttctacttctggggagacctcagaaaatttacaatcatggcagaaggtgaaggggatggaagcacatcttcatatggtgggcaggagaggggagaggtgctataaacttttaaacaagtggcactaaggaggatgttgttaaaccattagaaattgcccccatgatccaatcactgcacaccaggcccctcttccaaaactagggattataatttgacatgagatttgggcagggacacaaagtgaaattatatcatttgatgtcctggcttcctatttgygctttctttctttctttgcctaattttcctggctggaacgttcaatactatgttgaataggagtggtgagagagggcatccttgtcttgcgctggttttcaaggggtatgcttccagcttgtgtccattcactgtgatggctgaattaggttgccatagatggctattatcattttgaggtatgttccttcaatacctattttattaggtattgaagcttattaagtttttgacatgaagggatgtacaaaaatagtgctggcagtgttcctactgaaactattctaaataattaaaaggaagggatattgaattttatcaaaagctttttctacaggaaataaattcaatatcccttcatgtgaaaaacctaagtgattatctattgagataaacatgtgattgttttcctttggttctgttgatgtgatgaatcacatttattgatttgtgtatgttgaaccagacttgcctcccagagatgaagcctacttgatcatggtggataagctttttgatgtgctgttggatttggtttgccaatattttgttgaagatttttgcgtcaatattcatcaaggatattggcctgaagtttcctttttttgttgtgtctctgtcaggttttggtatcacgatgattctggcctcatagaatgacttagggaggagtccctctttttcagtttttggaataggttcagtaggaatggtaccagctcttctttgtacatctggtagaatttagctgtgaatctgtctggtcttagggtttttgtagttggtagaatttgtattactgcctcaatttctgaacttattattggtttgatcagggactcaatttcttcctggttcagtcttgagagggtgtatgtgttcagaaatttatccatttcttctagattttctagtttatgtgaatagaggcatttataattctctgatggttgtatttctgtggggtcagtgatactgtcatgcttattgtttctgattgtgtttatttaaatcttctctcttttcttctttgttagtctagctagtggtctctctataaattttttcaaaaaatcagctcctggattcattgatcttttgaatgatttttcatgtctctatctccttcagctcagctctgattttggttatttcttgtcttctgatagcttttggatttgtttgcatatggttctctagttcttttagttgtgatgttagtttgttaacttgagatctttctacattttagatgtgggcatttagtgctattaatttccctcttaacactgtcttagctatgtcgagagattctggtacattatttcttctcattagtttcaaagaacttactgatttctgccttaatttcattattaaccccaaataattcagtagcaggttattcgatttccatgtaattgtatggttttcagtgaatttcttagtcttgagttctaatttgattatgctgttgtctgaaaactgtttattactatttccgctcttctgcatttgctgaggattgttttatgtctgattatgtgatcaattttgggaataaatgccatgtggcaatgagaagaatgtatgttctgttgtttttgggtgaagacctctgtagatatctatcaggtccatttgatccagtgctgagtttaggtcctgaatatccgtcaattttctgtcttgataatatgtttaatactgtcagtggtgttaaagtctcccactatattacgtaggaatcaatgtctctgacattctctaagaacttgctttatgaagctcctgtgtttggttcatatatatatgtatgttttttaaaaatttttttgagatggaatttcactcttgttgcccaggctggagtgcaatgtcacgatctcggctcatcacaacttccacctcctgggttcaagtgattctcctgcctcagcctcccgagtagcttggattataaacatgcaccaacacacctggctaattttgtatttttagtagagatggagtttctccatgttggtcaggctggtcttgaactcctgacctcaggtaatccaccctccttggcctcccaaagtactggaattacaggtgtaagccaccacgcccggcctttggttcatacatatttaggatagctcttctttttgaattgaacactttaccttctttgtcttttttgatctttgttggtttaaagtctgttttgtcagaaagtaggattgcaatctatgctttttcttttttttttcttttgagacggaatttcattttgtcatccatgccggagtgcagtggtacaatctgagctcactccaacctccgcctcccaggttcaagcaattctcgtgcctcagactcctgagtagctgagattacagatgcatgccactatgcctggctaatttttggtattttttgtagagacacagtttcaccatgttggccaggttggtctcgaacttctgacctcaagctgtctgctcatctcagcctcccaaagtgtgggattacagggtgagccactgtgcccagccacccctgcttttttttgttttccatttgcttggtagattttcttccttccctttattttgaacctatgtatgtcattgcatgtgagatgggtcttttgaagacagcatactgatgggtcttgactccttatccagcttgccactctgtgtcttttaattggggcatttagcccatttacatttaaggttagtattgatatgtgtggatttgatcctgtcatcatgatgttagctggttgttttgcagacttgtttatgtggttgctttatagtgtcactggtctgtgtacttcagttggtgttcctgtagtggctggtaatggtttttccttttcatatttagtgcttccttcaggagctcttgtaaggcaggtctggtggtaatgaattccctcaggatttgcttgtctgaaaaagaacttatttctcctttgtttatgaagcttagttaggccagatatgaaattctgggttggaatttcttttctttaagaatgttgaatactggaccccaatctcttctggcttataatgtttcttctgagagctctgctgttagtctgatgggcttccctttgtaggtgatctggcctttctctctagctggccttaacattttttctttcactttgaccttggagaatcggatgattatgtgtcttggggatgatcttctcatggagtatcttactggggttctctgcatttcctgaatttgaatgttagcctgtcttgctaggttagggaaattctcatggatgatatcctaaaatatgttttccaaattggttccattctctcatctctttcaggtacaccaatcagtcataggtttggtctctatacataatcccatattttttggagattttattatttctttttcattctttattctctattctcatctgcctgtgttatttcagaaagacagtcttcaaactctgagatcttttctccacttggtctattctgttactaatacttgtgattgcattatgaaattcttacagtatgtttttcagctctctcaggttcattatattcttctctatactggctattttgtctgtcagctcctgcaatgttttgtcatgatttttagctctcttgcattgggttacaacatgtttctttcactcagtgaagttagtttttattcacattttgaatgctactcctgtcatttcaaccaccccagcctcagcctagttctgaacccttgctagagaggtgatatggtcatttggaggaaagaagacactgtggctttttgagttttcagtgttcttacactgattgtttctcatttttgtgggcttrtctacttttaatcrttgaggttgctgacttttggattttttttttaaacagtttggccactcttctgtagggctactgcagtttgcctgaggtccactcaagtccctagttgcctcagattttccagttcttagaggtatcatcagtgaaggctgtgaaacagcaatgattgcagcctgccccctcctctgggagctccatcccagagagctacagacctgttgcagcctgaatgtatctgtaagagttggctggaagccccagttgggaggtcccaccctgtgaggaggaatagrattggggacccacttaaagaagcagtctggccatgttttggtagagcagctgtgctgtgcttggggatcctttctgcccctggttggtttagactctccaaagcccataggctggaatggctgagttccccaaactacaaagatggtggcccacccctcccctgagtacttcrtctcaaggagaattcaaatttcttttgactaaagaacaccagcaggggtggcttgaggccccagttcagaggttgtacccattgaggaggaatggtattgggaattcacttgaagcagtctggccacactttcatagagcagctgtggtgtgctggggtatcacttctgccctgattggcttgggctctattttaaatttttaatttttttatttgagacagggtcttgctgttgtttcccaggctggagtgtagtggtgcaatcatggctcactgtggcctcaacctcctgggctcaagagatccttccacctcagccacctgagtagctgggtttactggtgcatgccaccatgcctgactaattttgttgcatttttggtaaaaatggggttttgcatgtcgtccaggctggtctcaaactcctgggctcaagtgatccacctgcaattccttaaatttgtatttcttcctggagagtttgtatagtgtcttgtcccaccaaaagaatgtgtgaaactgggaatattaatgttttagaactatgcagatcagctttttttttgcatatctggcaagcccaaactcctttgattttcctagtttactcttttcatgttcagatttaacttgtgaatgtactaatgtactttcttaagtaccaactctttgtctcctgacatttaagcctttagcaatgtacccataacctatatcttcaagctcatttcccatcttttcaactacattgcacttgtaacactcaatcaagctcatctacctttgtcttttttttttaacctatttaattctctattgttggaatatccttacctatacctctttcagcaatacttttcattcttgaaggctcaygacgtactttatctatgaaataatttataattctttcatataaaagtaatcttaaaatcatttaaatctctatgaaaagacaataaatctcaggaccccaaactcactatgccaaagggaaaagtcaagctgggaactgggtcacacaaacctgcctcccatttgatttctaaataagagagcttaaagataaaaagctatatacctttcctcacagttttcccacaaagaaatttcttataggtcttatgatctttatgctataatagttctgatgaatttcaccctggcagtataaattgagagcttatcttcacaggtgcgggacaaaggacagaactcaaagtcatcctgtgcacctgagacaaatgtgtatctgattgctttgtctgccctattgtttatgttatctcacataaaaatgcagattcactgagccagatgaaggcgtaaagggaaatgtcaaggggacatttctgtgtgactatttctgtgaccacctttctcacatgaaaattgtgtattcagggaaaggttgatcaaagactcaaaaggattcaaccatttgtctcttatctaccaatacattttaaaaaatattttttcttctcccaatgtttgccctttccccaatcagtattttttcttctttctttctttctttctttctttttttttaatgagatggactcttgcactgtctcccaggctggagtgcaatggtgcgatctcggctcactgtaacctccgtctcccaggttcaagtgattctcctgcctcagcctccagagtagctgggattacaggtgaccaccaccacgcctggctaattttttgtatttttagtagagatggcgtttcactatgttggccaggctggtctcgaactcctgaccttgttatctgcctgaatcggcctcccaaagtgctgggattacaggcatgagctaccgtccctggccagttttttttttttttttcctctaattttactttaagttctgggatatatgtgcagaacgtgcaggtttgttacataggtatacatgtgccatggtggtttgctgcacctatcaacccataatctaggttttaagccccgcatgcattatgtatttctcctaatgctctccctccccttgctccccaccccctgacatccccagtgtgtgatgttcccctccctgtgtccatttattctcattgttcgacttatgagtgagaacatgtggtgtttggttttgtgttcctgtgttaatttgctgataatgatggtttctagcttcatccatgtccccaaaaaggaaatgaactcattcttttttatggctgcatagtattccatggtgtatatgtgtcatattttctttatccagtccatcattgataggcatttggattggttccaagtctttgctattgtaaatggtattgcaataaacatacatatgcatgtgtctttttagtaraatgatttataatcctttgggtatacacccagtaatgggattgctgggtcagatggtatttctggttctagatccttgaagaataaccacactgtcttccacaacagttgaagtaatttacactccaactagcaatgtaaaagcattcctatttctccacatcctcaccagcatctgttgttacctgactttttaatgatcgccattctaactggtatgagatggtatctcattgtggctttgatgtgcatttctctaatgaccagtgatgagctttttttcatatgtttgttggccacataaatatcttcttttgagaagtatctgttcatattctttgcctagtttttatggggttgtttgtttttttcttgtaaatttgtttaagttccttgtagattctggatattaactctttgtcagatggatagattgcaaaaattttctcccattctgtgagtttgcttcttcactctaatgctagtttcttttgccatgcagaagctttttagtttagttatatcccatttgtgatatttggcttttgttgcaattgcttttggtgtctagtcatgaagtcttgcccatgcctatgtactgaatggtattgcctaagttttcttctaaggtttttatgggtctaggttttacatttaagtctttaatccatcttgagttaatttttatataaggtgtaagaaaggggtccaatttctgttttctgcatatggctagccagttttttcagcagcatttgttaaatagggaatactttccctgttgcttgtttttgtcaggtttgtcaaatatcagatggttgtatatgtgtgatgttatttctgaggtctctgttctgttccattggtctatatatctgttttggtagcagtaccataccgttttggttactgtagccttgtagtgtagtttgaagtcaggtagtgtgatgcttccagctttgttcttttggcttaggattgtcttagctatagaagatctttttggatacatattaaatttaaagtagttatttataattctgcaaagaatgtcaatggtagtttgatgggaatagcattgaatccataaattactttgggcagtatggccattttcacgatcctgattcttcctatccatgagcatggaatgtttttccatttgtttgtgtcctctcttatttccttgagcagtggtttgtagttctccttgaagaggtccttcatgtccattgtaagttgtgttcctaagtattttattctctgtatagcaatagtgaatgggagttcacccatgatttggctttctgcttgtctattagtgtataggaatgcttgtgatttttgctcattgattttgtatcctgagactttgctgaagttgcttatcagcttaaggagattttgggctgagatgatggggctttcaaaatatacaattatgtcatctgcaaacagagaaaattttacttcctctcttcctgtttgaataccctttatttctttcccttgcctgattgccctggtcagaacttccaatactatgttaaataggagtgttgagagagggcatccttgtcttgtgccagttttcaaagggaatgcttccagcttttgcccattcagtatgatattggctatgggtttgtcataaatagctcttattattttgaagtatgttccatcaatacctagtttattgagagtttttagcatgaaacaatgttgaattttattgaaggcctgttttgcatctattgagataatagtgtggtttattgtcattggttctgtttatgtgattgattacgtttattgatttgcgtatgttgaaccagcctttcatctcagggatgaacctgacttgatcatggtggataagctttttgatgtgctgctggatttgttttgccagtattttattgaggatttttgtatcaatgttcatcagggatattggcctgaaattttatttttttattatgtctctggcaggttttggtatcaggatgatcctggcctcataaaatgagttagggaggcgtccctctttttctgttgtttggaataatttcagaaggaatggtaccagctcctccttgtacctctggtagaattcggctgtgaatctgtctggtcctgggcttttttttttggttgacaggctattaattactgcctcaattttagaacttgtattggtctattcaaggattcaacttcttcctcctttagtcttgggagagtgtatgtgtccaggaatttttccatttcttgtagattttctagttagttgtgtaaaggttatagtattctctgatggtagtttgtatttctgtgggatcagtggtgacatcccctttatcattttttattgggtctatttgattcttctctcttttcttattagcctagctaacagtctatgtattttgttaatctttaaaaaaaaaaaaaaacaacctcctggatttttttgagagttttttcatgtctctatcttcttcagttctgctgtgatcttagttatttcttgttttctgctagcttttgaatttgtttgctcttgcttctttagttcttttaattgtgatgttcaggtgtcaatttcagatttttccagctggtgtgggcatttagtgctataaatttccctctaaaaactgctttagctgtatcccagagattctgctatgttgtctctgttctcattggtttgaaagaacttgatttctgccttgatttcattatttacccagtagtcattcaggagcaggttgttcagtttccatgtaattgtgtggttttgagtgagtttcttaatcctgagttctaatttgattgcattgtgatctgagagactgtttgttactatttctgttcttttgcatttactgaggagtgttttacttccagttatgtggtcaattttagaataagtgtgatgtggtgctgagaagaatgtatattctgttgatttggggtggagagttctgtagatgtctattaggtccacttggtacagagctgcgttcaattcctgaatattcttgttaattttctgtctcattgatctgtctaatattgacagtggggtattaaaatctcccactattattatgtgggagtctaaatctctctgtagatctctaagaacwtgttttatgaatctgggtgctcctgtattgggtgcagatatatttaggatagttagctcttcttgttacattgatcctttaccattatgtaatgccctttgtcttttttgatctttgttggcttaaagtctgttttatcggagagcaggattgcaaaccctgctttcttttgctttcaatttccttggtaaatattcctccatccctttattttgagcctatgtgtgtctttgcacgttagatgggtctcctgaacacagcacaccgatgggtcatgactctttatccagtttgccagtctgtgtcttttaattcgggcatttagcccatttacctttaaggttaatattgttatgtgtgaatttgatcctgttgtcatgatgctagctggttattttgcatattagttgatgcagtttattcatagtgtcattggtcttatattatggtgtgtttttgcagtggctggtactggttttttctttccatatttagtgcttccttcaggagctcttgtaaggcaggcctggtggtgacaaaatctctcagcatttgcttgtctgtaaaggattttattttttcttgacttatgaagcttagtttggctggatatgaaattcttggttgaaaatttttttctttaagaatgttgagttcaggcatggtggctcacgcctgtaatcccagcactttgggaggctgaggtgggtggatcacaaggtcaagagatcgagaccatcctggccaacatgatgaaactccatctcgtctaaaaatacaaaaattagctaggcgtggtggcgtgcccctgtagtcccagctacttgggaggctgaggcaggagaatcactttaacctgggaggtcgaggttgcagtgagcgaagattgtgccactgtactccagctttgtgacagagtgagactccatctaaaaaaaaaagaatgttgaacattggccctcactctcttctggcttgtagggtttctgcagagacatctgctgttagtctaatgggcttcccttttagataacttgacctttctctctggctgcccttaacatttttttctttatttcaaccttggagaatctgatgattatgtgttgctctttttgaggagtatcttagtggtgttcactgtatatcctgaatttgaatgttggcttgtcttgctaggttgtggacattctcctaaataatatcctgaaatgtgttttccaacttggttccattctccccgtcactttcaggtacaccaatcaatcataggtttggtgtttccacatagtcccatatttcttggaggctttgttcatttcttttcattcttttttctctaatcttccctttgcaccttatttcagtaagtttatcttcattctctgatatcctttcttctgattgattgattctgctattgatactgtgtatgcttgacgaagttctcctgctgtgtttttcagctctatcaggtcatttatgttcttctctaaactgcttattctagttagcagttcctgtaaccttttattaatgttctttgcttccttgcattgggttagaacatgctcctttagcttggaggagtttgttattatccaccttctgaagcctacttctgtcagttcatcaaactcattccccgtccagttttgttcctttgctggagaggagttgtgatcctttggaggagcagaggaattctggtttttggaattttcagcatttttgtgctggcttttcctcatcttcatggatttatctacctttgatttttgaggctggtgacccttggatggggtttttgtgtgggggtcctttttgttgatgttgatattgttgctttctgttagttttttttctaacaatcaggcccctcttctgcaggtccactccagaccttgttcacctgagtatcagtagtggaggctgcagaacagcaaagattgctgcctgctcctttttctggaagcttcgtcccagaggggcactggtctgatgccagccagatatctcctgtaggaggtgtctgtcagcccctgttgggaggtctctcccaatcaggaggcacgagggtcaggtacccacttgaggaggtagtctgtcccttagcagagcttgagtgctgtgctgggagaatcctccttgtctagattagctgctctcttcagagccagcagacaggaaagtttaagttgtctgaagctgtgcacacagccaccctttttcccaggtgctctgtcccagggcgatgggagtttatctgtaagcccatgactgggcctgttacctttccttcagagatgccctgcccaatgaggaggaatctagagaagtagtctggccacagctgctttgccgctctgtggtgaattccacccatcccaaacctcscagcctttttagcactgtcaggggaaaaccacctattaaagcctcaataatggtggatgtccctccccgcaccaagcttgatcatcccaggttgacttcaractgctgggctggcagtgagaatttcaagctagtggttcttaacttgctgggctctgtgggcatgggacctgctgaggaagacctcttggctccctgacttcagccccctttccaggggagagaacagtcctgtctcagtgggattccaggcgccattgtgatatgaaaaaactcctgcagctagctcagtgtctgtcgaaacagccrcccagttttgtgcttcaaacccagggctctggtggtgtaggcacatgagggaatctcctgatctgcggattgcaaaattcatgggaaaagcatagtatctaggccttgtagcacagtctcccatggcttctgttggcttggggaatgaggaccccggcttcttgcatttcctggttgaggcaatgcctcaccctgcttctgytcaccctctgtgggctgctcccactgcccagccagtcccagtgagatgaactgggtacctcagttggaaatgccgcaatcacttgccttctgtgttggtctctctgggagctgcagaccggagctgttcctattcagccatcttgccctcttgccccctttcagtattgaaatcctcaaaatcatctttggagaaagttgtagacctgcctcctggacattcatatttatctttggcaaataaacctaaaatgattaagactcacctcggttatttttattgatttacactgctataacactttatgcttccctaattacagtttaccacttattaaatttttatattggtcttatactactgcataacagattttaatttatttaaaataaagggcagcctttgcaatttttgttttctccaaagcggcatgtgtcttgtatatcctaggcaatcagatattattgaattgaaactgattgtcctacaactctatcctttccttttctgctcctcagtaatttgagctcttaatatttcctgtctgtcctaatttgataacatcctaaccgatttggctgagttcatctgttttcactctacatattgtatgataataagtttattacccaaggcaaatcatgcctttttttctgcctcaaacacaatattgccttctaaataggatcagtctactcagtatgacatccaagatcctctcatctctttgccttatctactcagtgtctactctaaattctgtgcatttgtcttggtacctgaaatgaggtctgtggtatcatagtacgtataggaatgacattaataagttaactggggtaactgcacacaactgcttatgacaggaataatagacataggagggtttctggctgcttcattcttcacctggctgccccaaaagttgaggagaagttatgtaatcacagctataacctatttaagacacaacttggaggcagctttgtaccatgcttacacaccctttggctttcatttgtgttgtctccttttttaggaaatattgccctccaccaattccacgggctccccctgccgcattgctttcattgttaaaatgtataccaatctttcaaggcctgaccctgatgttgcctcaaaacttttatctgacttctttctctaaaattgtgtttgatttctgttttctccatagcattttatttatatatttttaataaaactacaaataatctccctggtattaggcatatccttgttgccttcccttcctttaactccataaggttgcaaatctttgatttgcattctattcactatttaatctattcactttttaatcttctttagcagacaaacagcagcctgcacatagaaacatagaatacactttttttgagtcgacttgctgggtatctcataaaagtaatgttttatgccataaatggaagggaacagttagattgatagtgtttcttgtcatttcttttaaaaaataaattattaaaatcattagttaagtgtttctcaaactttagtgagaataacctagacagcttattgaaacacagatttctaggttccaatcccagaggtttttttttttttttttttgagacagagtcttgctgtcacccaggctggagtgcagtggcacgatcttggctcagtgcaagctcccagagtttttattcagtaggtgtgggatggtttccaaaattagcacttctaacaagtttgcatgtgatgctgatggtgctggtcaagggattacgttttgaaaatgctgcattgagcwgcagatatgcttgtttggctttaggaggtcttgtgaaagtatcattttagaaggatattttttgaatacgcgtgacaaggtagaattgttgggtgatataacaaaaccagaggttacattttctgacttcagccattctttgttaggcttatgcataggaaatacaaatgttcctttgggatttactcttttgcatttatactggtattctcaaactacaaatgtacaattctgtgccagagaaggtactccctgtgcagcatgcatcttggagcctctttattttgcttattatccactagaagccagaagtcaccaactctacattagattaatgtccaagttctggaggacagtggagagaagggccaggttgtcttactctgcttccatcttgaaaatgagtgattacaacaaatgtctggtagaggagaggacaactaagagcaagagagacacatgttcctggggccaaataatttccttcttatgccctgtaaagggcatttaccccataaagaacagcccattcttaaagacagtgtcattttaattatgttgctagtttaccagggccttatggatgacagttgtgaagctggccatcatttataacactgcttcttgggataatgcattctgatttccaagtagctaatttggaaatcaactcagggaacacaacctgtctgcaaattgggtactgcttgtactgcagtttctagagcatatttgttctacttatttcctaaaatggctcatttgtatacagcagggtaataatacaagcaggtgcttagtctgtgcaaagaaattgacaatttcctgtggatattgtctgttcacatagggtggaggcaatgatgtaaaaaccttgtggcagttgcagattctcattctggatcaaaggaagggtaaaggctatgtctgttagctaacactacagtgttatgagtacactaacactacagtgttacgagtacactaaaggtactgggtaagtagtggcctctctgggatgtgtttggctggcaggcaggtggaggaggacccttargaagtaaggaccagaataagaggagtacactgtctatgacacacagtgattgtcaaaaacagtgaccaagagggttatgaatgttcatttaaccaaattttatgtggatatctgcacagcattaacaataatcgctaagtaagtggttttgaatgtggaatgtggtgacctattttcaccaaataggttcctgaggaagctgactctgagccagagatcgrcatgcaggatatttatgagggtgagctcttaggatcaaaatctatattactcagggttttctagagaaatagaaataatgttttacctgttatctgggcatcccttagcccagtcaagttgacacataaaattaaccatcacaacagcgacaggaagcaggactgggctaagcccccaaagcttccctcagccagggctgtggggggctctgagattgggatgacctctcagcatttccctggtttgggccaatgggactggcctgtattcttctgtatccatcagtttttggatacaggctgccccctgggaaaggggttgtgactttggctgaggaaattctcagagagggctgagagtgtctgccagtagccagacatgtatccttctgttctgaagggaggtctgagtgtcaaggcagagcatccrtgacacctgttcaggaagcaggagtgtctatgagcagctgggaatacatagaataggctctgtctgtaggggaggatcagaggtccttagcagaggtccatggttgcaggtgaataagcaattacagggcactgggcaccttaaaaggaactagaatcatataacgtggcctggatttattgaacttcatcagtacattcatcaactcatatatagtattgctaacccatacagtagcctcaaaagtaagtactgttaacttcactttacagaagaaggcttaaatagaaaagtgcttgctcatggccagataggtgatagatgcctgcagcagactccaacaccaagtctctttctgaagctcctgctcttttgactctgttccctgaacagactctggaaatttagtcacacaaattttcaaagccaggacaaatccagtagtagcttcagaatggctgagcacaggctgcaggaaaccatcccagggtgccaggcttgaggtgatatgtgttcctaatgatgagtgagccaaggccccaagaggagcttagcccacagatgggcagagctggggagaagcgatggcagacagtggaggcaaaaccttggtgtttccagctcagaatgaggtagccggatgactgaaatataatgatttgttattrgagaatcagggttgccaattaaactcatactacattgagctgtgcaaagggcttgtagctctattttctacagaagatattttatctcctttgagaacctctttctgtctaattagtgagaggggaataaaatatctaaatttaatcattctgattcaataatttaaatggtctcttaaggtaaatcagtttcttttagatcaaatcctaatctttcagattgttacttcctcactcatattttcttcccatatgatgttgggatgtatggaggtataagtgatttggcatgattgkgttggggaataatgatggggcctccaggagccatgagcaggtcctggcactgcctcctcttcttgtggtagcagtttccctcattctacttgtctgctcaggtcaagtggagttctctttgctcatgcctcagttatatcccagaggacctccctgaagattcagcctcagcttacctttgatgggcttctggacctccctgaaatctgcttgcagctgatctgattcccaactctggtcattccagcaccttccagtgtctgtgccatttgatttttatagcagatacctcccttgccatctagcattatcagctaccttctgcattgctccacgatgcatgtggaaacatgaaactattgtccatgcttcttgagagctgaagccacctccagaaagactctagtaaggccaaggccttccatctctaaccaacagtgatgcaccacctctctcattctgcaatggtcactcctgtgctgaggtgaggacagcttctaaatcatcacctcactatctcagacagaaatgtggtcagaggacaccaacttttggcttgattcccaatctctttaccttgttgcctggattagtcgaggggaggacagcgagatgttttatctttttcttcctcctgctgtcttcccactgctgcagtgccaagctcccatgctccttctcccatctcatgggaacctgccgtttcctcataggcctttccccttttcttctttttccagatcaatgatgatggaattgctactaggaggcagggagaagactgaaaacacatcaatttaatattcccaaatattccttttgtatgagctatggcacacataatgaatcatctttctttgcaccctttctcagaatcctgtttttgccgtgcaatgcaaaaaatgtactatttgccttaatttcccctgacttatgatgcctctgaattaaatacttgccaaagtggaggaaaaagcctttctaaaactttgcaaatagatgaattgctgactcaataattgaaggaatctcttggttgcttcattgtgtggtcacagtaataagaaaaagaagttatagttaaatttctcagaaattgaaatattcatacattgaactatttctgatataattgtaaagagtactttttaaaaattttattattattatactttaagttttagggtacatgtgcacaatgtgcaggtttgttacatatgtatacatgtgccatgttggtgtcctgcacctattaactcgtcatttagcattaggcatatctcctaatgctatccctcccccctccccccaccccacaacagtccctggagtgtgatgttccccttcctgtgtccatgtgttcttattgttcaattcccaccaatgagtgagaacatgcggtgtttggttttttgtccttgcgatagtttgctgagaatgatggtttccagtttcatccatgtccctacaaaggacatgaactcatcatgttttatggctgcatagtattccatggtgtatatgtgccacattttcttaatccagtctatcgttgtcggacatttgggttggttccaagtctttgctattgtgaatagtgccgcaataaacatacatgtgcatgtgtctttatagcagcatgatttataatcctttgggtatatacccagtaatgggatggctgggtcaaatggtatttctagttctagatccctgaggaatcgccacactgacttccacaatggttgaactagtttacagtcccaccaacagtgtaaaagtgttcctatttctccacatcctctccagcacctgttgtttcctgactttttactgatcgccattccaactggtgtgagatagtatctcagtgtggttttgatttgcatttctctgatggccagtgatgatgagcattttttcatgtgtttwttggctgcataaatgtcttcttttgagaagtgtctgttcatgtccttcgcccactttatgaaggggttgtttgtttttttcttgtaaatgtgtttgagttcatggtagattctggatattagccctttgtcagatgagtaggttgcgaaaattttctcctattttgtaggttgcctgttcactctgatggtagtttcttttgctgtgcagaagctctttagtttaattagatcccatttgtctattttggcttttgttgccattgcttttggtgttttagacatgaagtccttgtccatgcctatgtcctgaatggtattgcctaggttttcttctagggtttttatggttttaagtctaacatgtaagtctttaacccatcttgaattaatttttgtataaggtgtaaggaagggatccagtttcagctttctacatatggctagccagttttcccagcaccatttattaaatagggaatcctttccccattgcttgtttttctcaggtttgtcaaagatcagatggttgtagatatgcggcattatttctgagggctctgttctgttccattgatctatatctctgttttggtaccagtaccatgctgttttggttactgtagccttgtagtatagtttgaagtcaggtagcgtgatgccgccagctttgttcttttggcttaggattgacttggcaatgcgggctcttttttggttccatatgagctttaaagtagttttttccaattgtgtgaagaaagtcattggtagcttgatggggatggcattgaatctgtaaattaccttgggcagtatgaccattttcacgatattgattcttcctacccatgagcatggaatgttcttctgtttgtttgtatcctcttttatttcattgagcagtggtttgtagttctccttgaagaggtccttcacatcccttgtaaattggattcctaggtattttattctctttgaagcaattgtgaatgggagttcactcatgatttggctctctgtttgtctattattggtgtataagaatgcttgtgatttttgtacattgattttgtatcctgagactttactgaagttgcttatcagcttaaggagattttgggctgagacaatggggttttctagatatacaatcatgtcatctgcaaacagggacaatttgacttcctcttttcctaattgaataccctttatttccttctcctgcctaattgccctggccagaacttccaacactatgttgaataggagtggtgagagagggcatccctgtcttgtaccagttctcaaagggaatgcttccagtttttgcccattcagtatgatattggctgggggtttgtcacagacagctcttattattttgagatacattccatcaatacctaatttattgagagtttttagcatgaagggttgttgaattttgtgaaaggccttttctgcatctattgagctaatcatgtggtttttgtctttggttctgtttatatgctggattacatttattgatttkcgtatattgaaccagtcttgcatcccagggatgaagcccacttgatcatggtggataagctttttgatgtgctgctggattcagtttgccagtatcttattgaggatttttgcatcaatgttcatcaaagatattggcctaaaattctcttttttggttgtgtctctgcccggctttggtatcaggatgatgctggcttcataaaatgagttagggaggattccctctttttctattgattggaatagtttcagaaggaacggtaccaattcctccttgtacctctgatagaatttggctgtgaatccatctggtcctggactttttttggttggtaagctattaattattgccacaatttcagatcctgttattggtctattcagagattcaacttcttcctggtttactcttgggagggtgtatgtgttgaggaatttatccatttcttctagattttctagtttatttgcgtagaggtgtttgtagtattctctgatggtagtttgtatttctgtgggatcagtgttgatatcccctttatcattttttattgtgtctatttgattcttctctcttttcttctttattagtctttctagcagtctatcaattttgttgatcttttcaaaaaaccagctcctggattcattaattttttgaagggttttttgtgtctctatttccttcagttctgctctgattttagttatttcttgccttctgctagcttttgaatgtgtttggtcttgcttttctagttcttttaattgtgatgttagggtgtcaattttggatctttcctgctttctcttgtgggcatttagtgctataaatttccctctacacactgctttgaatgagtcccagagattctggtatgttgtgtctttgttctcattggtttcaaagaacatctttatttctgccttcatttcgttacgtacccagtagtcactcaggagcaggttgctcagtttccatgtagttgagcggttttgagtgagtttcttaatcctgagttctactttgattgcactgtggtctgagagacagtttgttatactttctgttcttttacatttgctgaggagagctttacttccaactatgtggtcaattttggaataggtgtggtgtcgtgctaagaaaagtgtatattctgttgatctggggtggagagttctgtagatgtctattaggtctgcttggtgcagagctgagttcaattcctgggtattcttgttaactttctgtctcattgatctgtctaatgttgacagtggggtgttaaagtctcccattattattgtgtgggagtctaagtctctttgtaggtcactcaggacttgctttatgaatctgggtgctcctgtattgggtgcatatatatttaggatagttagctcttcttgttgaattgatccctttaccattatgtaatggccttctttgtctcttttgatctttgttggtttaaagtctgttttatcagagactaggattgcaacccctgcctttttttgttttccatttgcttggtagatcttcctccatccctttattttgagcctatatgtgtctctgcacatgagatgggtttcctgaatacagcacactgatgggtcttgaccatttatccactttgccactctgtgtcttttaattggagcatttagcccatttacatttaaagttaatattgttatgtgtgaatttggtcctgtcattatgatgttagctggttattttgctcgttagttgatgcagttttcttcctagccttgatggtctttacattttggcatgtttttgcagtggctgctaccagttgttcctttctatgtttagtgcttccttcaggaggtcttttagggcaggcctggtggtgacaaaatctctcagcatttgcttgtctgtaaaggattttatttctccttcacttatgaagcttagtttggctggatatgaaattctgggttgaaaattcttttctttaagaatgttgaatattggcccccactctcttctggcttgtagagtttctgccaagagatccgctgttagtctgatgggcttccctttgtgggtaacccgacctttctctctggctgcccttatcattttttccttcatttcaactttggtgaatctgacaattatgtttcttggagttgctcttctcgaggcatatctttgtggcgttctctgtatttcctgaatctgaatgttgacctgccttgctagattggggaagttctcctggataatatcctgcagagtgttttccaacttggttccattctccccgtcactttcaggtacaccaatcagatgtagatttggtcttttcacatagtcccatatttcttggaggctttgttcgtttctttttattcttttttctctaatcttgccttctcgcttcatttcattcatttcatcttccatcactgataccctttcttccagttgatcgcatcggctcctgaggcttctgcattcttcacatagttctcaagccttggctttcagctccatcagctcctttaaggacttctctgcattggttattctagttatccattcgtctaattttttttcaaagtttttaacttctttgccattggtttgaatttcctcctgtagctcagagtagtttgattgtctgaagccttcttctctcaactagtcaaagtcattctccgtccagctttgttccgttgctggtgaggagctgtgttcctttggaggaggagaggcactctgctttttagagtttccagtttttctgctctgttttttccctgtctttgtggttttatctwcttttggtctttgatggtggtgacgtacagatgggtttttggtgtggatgtcctttctgtttgttagttttccttctaacagacagggccctcagctgcaggtctgttggagtttgctagaggtccactccagaccctgtttgcctgggtaacagcagcggtggctgcacaacagcgggttttcatgaaccgcgaatgctgctgtctgatcgttcctctggaagttttgtttcagaggagtacccggccgtgtgaggtgtcagtctgcccctactggggggtgcctcccagttaggctgctcgggggtcaggggtcagggacccacttgaggaggcagtctgccccttctcagatatctagctgcgtgctgggagaaccactgctctcttcaaagctgtcagacagggacatttaagtctgcagaggttactgctgtctttttgtttgtctgtgccctgcccccagaggtggagcctacagaggcaggcaggcctccttgagctgtggtgggttccacccagttcgagcttcctggctgctttgtttacctaagcaagcctgggcaatggcgggcgcccttcccccagcctcattgccgccttgcagtttgatctcagactgctgtgctagcaatgagcaagactctgtgggcgtaggaccctctgagccacgtgtgggatataatctcctggtgcgccgttttttaagcccgtcggaaaagcacagtattagggtgggagtgacccgattttccaggtgccgtctgtcacccctttctttgactaggaaagggaactccctgaccccttgcgcttcccgagtgaggcaatgcctcgccctgcttcggctcgcacacagtgcactgcacccactgtcctgcgccgactgtctggcactccctagtgagatgaacccggtacctcagatggaaatgcagaaatcacccgtcttctgcattgctcacgctgggagctgtagaccgaagctgttcctattcggccatcttggctccctcaaccaattgtaaagagtacttttaagcctgtggtgtaagatcagaatctaagaggtcaaatgagcaatttaaaataattaatattaatgacttttttagtcattcaatttcctttaagacctcatcagtaggtagtttactttcatcccctactaagagaccatttctaacatttgacagtgtaactttgttttttttacaaatttagtattctgaagtgctgtgtagttgacagtcttctactcagtgtgtcctcccaaaacagcagacctggtgttacctagagcctgttagaaatgcagaatctttggctcactccaaacctactcaatcagaagctgcattttaacaagatccccaggtgacttgtatgcacattaaagtatgagaagcactagtcagcgacgctggagaaaaccctgcaaagaggcattattaaattcactcagtgtgtttttataaaccatttataacaaataataaaatgaagtggaagtaaatcatccctttgcactctggttcttataatattatttttcaaatctgtgctcacttccttcccctaattaaaaaaagagacagctgttcactctgtgcacctgtgttaacccgggtccaggctcagttaggtttctgcagcagtcaagccagctaagcacagctgtggcatagcttcaaatcagcagttcttcaggccacctgttacaacaaactacattaaaacactcccaagcaatcttgtctccaattccttcctcccctagcccccagtagtatgccatagtaattgaaagcaatataaattacttgtcaaaagtaaatctctatgaagaaaagcagctgtgttatattgaaaggacctaatttcactaaatagttcccttcctccacatcagttaaaaccacaggagagaggggtgggatgatgggttataaaataccctgaaatcccaccagaagaggcctctacagccaaagcaaaatgaggatctaaacaagaatcttgctaatgtagccaagcccagaactgccgggataattgaggataagagttgctttgttctcccttcccactccctgctattttctccttctcaaccccccatttagctttaccctcagcgattactctacctttttagcattccaagaatacctctaagcatctacctctttctgtgtacacccaccgtttcctgctcaatagtcttttgtttcttggttaactcagtagcaaggctattgagtcctggcttaaagctcacatcttcaaagacaggggaccagaaccataaatgggcacactgamtagcatgcagcagaggtttaggaagaaaaaggacaatgaggtcacagaatccagtgcacctcatgataagtggcagcttttggctttgattagggaggtccagcaattataaataaagatgatcacattagttatattggaacgcctacatcatgttcatttattcattacagagctttgagggaggaattattatcatcaccatcatcaccgctttagaaaaccaaagctctaagagattttagaaaatttccagttagtaaactgttgtattagaattaacacctaaatcactgctcttgttacaacagcctgcttcccttctgggtgtctcagcagatgggcacagcatgaatacagacatgtctggcaacaaggtgatatgtggatttgcagccaggtagtcatatggtgggtattaggaaagtctgcctggaagtaacagaacatctgctgtgggcctagggttcaggggcaggacttgaatgctgaaagtaaaaccaaaactaagtagggtctactcttaggagaattggggttcctgacagttgtcaattgtggaccctcaattcaagtagaagtagtcatctggaatacaatgtggggactgagttctagcaggcagtgactaagaactagggacagcaatggaggaaaagaaggaaacaaggaagtaggaaaaacatcccattttcacttgagacacggacctgttgaaacctgcccagttgtcccatagaactgatgtttatgggtttttttttgaataaacatagaaatggactttcccagtcttaaaacttgataaaattatctttgtcttatctgagttccttcttgaggaaaccagccctcaggcctcccagatggtatcaaggaactgaaactcaccagaccaccacatccagataatgagaaatcagaccctttatccctcatgatatccttaccccaccctaatttctgttaacctgcatgtgattgccattcttccctgctatataaacccctaattctagttggttgaagaaatggatttgagactgatctcccatctccttggctgcagtatccaaataaagtcttcttccttggcaatactcattttgtctcagtgattggttgtctgtgtggtgagcaacaagacctagatggaacccctgggtgtttcagtaacactatgaatggagtgaattgyggaattccctctactaagcatagatctggtcctagagactgggttgtagtggagtgtgaaggtggagatgaaaacaaagatggaaaagacattttctggggctttcttttgtggtactagagatttaagtggaaattacaaagagtctgacttaagctaattgtaaaaggaatcctctragaatccggactccaagtttaagaccagcctgagcaacatagcaagaccctgtctctataaaaaataaaaacaaacaaacaaacaaaaaatctggactccaaggtggaatagaatgctgtatgaaggcattatgtttctgtccccagaacttacaaaaacatttctgtgcttactaggcatttaatgatttctgtcacacttctgataacgatctaaacttttactgtggccctgaagccctatctaatgtgtctcctgtctagctctctgacctyctgtctatcaatttctctatactcactattctctgtcagggctgcttgacggaggtgctggtattttggttgggaaaattccttctggagctttttcaaatactgctagatatttagcatcccttgcccctgttcacaaaataccagcaacacccccttgctatcacgtgcccccacacacttctaatgctccaggggagacttgatctgtggctccctggcatcccttcactttaatatgtgaagctcattcctgtctcagggctatcacactggctttgaatcttgttcccatgatatttcatattctcatttttcagtctacataccatttcctctaagggcatctcccagccctcgttcagagcatttatcatgatccaaaatgactttctttgacttttcctctttgtcctttttcttcccctcactagaatgaaatcctatgagaaggaagttgtgtacttcacgttcaccactgtacattgacacacagaagactgcttcatgtgtgatagatcctcagatgttttttgaattttatgaattaaggaaatggaattttgaatactacgaataaagggatagatgatcactttccaagattgtatagaggaggtttctgcattaggtagaaaactgtattccatatcaatgtaagactcaactgttcttttctgtagtttctagagcgtttgaaggagaaagaattttgctcactgagcttctaataaattttagtggaacacatacattcaaaccatagcatctctcaagttcatgttgaaaaaatgattttaaaagaaaaatcagttagaaaagccaggtaccttttctaaaggtcagacgtattttcaaattaaagcaaaatggccaagattaacccctaaccccaaccttaaaaagttaaccaggtttgttctcctcgtgaatgtattctcacgggatgatgctaatgacacttagcctctggggcccctcacttacccaaggcccagagagagtcctttatggtattcataatatttattctttttttaaaaaaagagaagcccaaaactgtataagcctcaggctccacaaaatctgtatctacctctatatatactattaaagtagacataactccctcttggttattgcaacccaggaaaaaagaaatggacagtggcagtgggggtggggggtggtggaggtgcttgtttctattttcaaagactgttatttaaaatgaacaaatgatggaaatatccatgcctgaaagtaaggtgatcaaatgaacacacctaagtgctaaaagaatggaatattttaaagaactagctgctgtggaagctggtacaacataaattatatatacagataaactgaacatattttatggcttttaatgtggatatgtggcaaattccctcttcttcatattttcctcctttgagggtgactttaaggattgtagaagctttttttttcttttttcttggaaagatgtaataaggacttatgaacagaagacatgtctgtgtgccaggcagctgtgagacaaaatcgtggatctccgcactgtaaacccccagacccaggacttacataacctagggaaatgttgattcagaagggatgtgtaggacagttgaagtacaagaacatcaaggtcatttcacccaagggcagaatttatggtaagtacctactcttacacaaggaacaagagataaactggaaattttagaggtcttcctggaactggggttaatcagaagtcaatatggtagattagcatccaagatggagtggctttggcttccacactccatcccctaattcagctcttacagtttcatctgccttcctcttctgtgatggtccctgagcctttagggaagatgcttgatatggtataggtttagcagtagtatgttggcaatggaaaacagagcaggccaactgagattccaaatgagggagattcccaggctttgttgaatcatctccagtttttgaaatactgtgacttcagttttctcagaagaagtaaaacaacgagagagatattaataatttgagtagtagaattataatgcataccaggattaaaatcaaaagagaatttgaggccaggtgtggtggctcatgtctgtaattccagcactttgggaggccgaggtgtgcggatcacttaaggccaggagtttgagaccagcttggccaacatggcgagaccccatctctaataaaaatgccaaaaattagctgagcatggtggtacacacatgtaatcccagctccttggtaagttgaggcatgagaatttcttcaacccaggaggtggaggttgcagtgagctgagattgtgccactgcattccagcctgggcaacagagtgagactctgtctcaaaaaaaaaaaaaaaaaaaaaaaaaaaaaaaaaaagaattagaatgccagaaaaacaaaaacacaaaagaacctattccattaagaagccaactaaaggcatcgtgaagaaaattaaaatccagttcttctttagagatttgttgcagtcaaaaaataattcaggattagctcaaattttaggcaactgataactccaaaacaatgattagggctagcatctaagtttttctctctatagtttccccatttctaccaaggataaaccatattaggacaaatttattttcacaataaattttagttttattatacttggcctgattatttgtgtaaagtgtagcaagaatactgatgggccacataggctctttttaagttggctttgctggaactcttataagaaatttcagatttgactttttaaaagcctcaaggcaagaagccaagccaaggatttgccatcaaactgtgcttgtaatgcctctcttctcaaggtcccaaaatatcttgaggttcctgagcctgttagaaagtgacattcttttttttctttgagacagagtcttgctctgttgcccaggttggagtgtagtggcgtgatcttggctcactgcaccctctgcctccctgsttcaagtggttctcctgcctcagcctcctgagtagctgggattacaggcgcctgcccctacacctggctaatttttgtatttttagtagagatggggtttcaccatgctggccaggctggtcttaaactcctgacctcaaatgatctgcctgtcttggcctcccaaagtgttgggattacaggcgtgagccaccacgcccagccagaaagtgacattctttacttaccacagatcaggaaccttgtaatggaacaatttaaacaagataccaggctagtctttccaaggggctttttattggctctataaagttgacttcaattcctaaaagcaatctgataatatctgaaaatatgctattccagtcaaagccttggaaaaataaccagtgtctccaattgtgttccattataaaagaaaacacattcttactgaatttatgcaaataactagattgccacaaaataagaatactcctgaatagtttccaaattttggagaactcaggtagagaaaaaggtaaattttgctctttttgagtatttgaaaaaatactcaacttcttggtacaataaaaacttcagctgaattaaattagtgtttaattgaacaatgaaagatttgygaatcaggcagcccccagaatcacagcagtttcagagagactccagggatacctygtggtcagaacaaatttatagacaaaaaaaaagggaagtgatgtacagaaatcagaagtgaggtaccaaaacaattggattggttacagctctgcagttgccttatttgaacacaactggaacactcagcagtgtgtgcgtggttgaattacggctgctgggattggccaagactcagtgactgttacaggtgcatactcctaagttaggttttcaatcttgtctacctattaagctaggttgcagttcatccataaggactcaaatatagaagtatggagtgcttctcaggccatatctagtttgctttaacattctctaagctataaatagctcaaaagaaagaaagatttccttgattcttcgtcatttggagtagcagccttccaaacagaatgttgtccattcacctgggaactgccatccacaaatcaagcagctctttgtcagtcaagtgagacctgtttatcaggcactgtggaatccagtggctcctcacacagttccacagttagtcctgtggaaaaggctttctgcttatgactgtcacttccttgcacttcccaggtagcaagatcttataaaccacttgcattttctcatggaactcttttggccattgctatccccattagcacaggagtagcttcatttaatgtcccatagcaaggcagtaaatgccccccaagtggaaattctctagtccaaagtgccagtagtcattgttgagaggggctcacaaacttctgccataagccccagtaaatgctccacaaacagctatttggtggagaattcattttgaccaacactccagcttctactctacactctgtaggctcaggcagtcttaattcccatttagcatgtccaattaatattgctcaaagggaagattgacatgccttctttgtttacagtactaggtaggggaagcgttccctggttagatacagcatctgttttcataaaaggtttagttaaagaatacccaactactttacataaagcctgtttaaacatttcaacttttatcaaccctaaatttttatcttctgtttccaggaacttctcttttccactcccattttaccctctgatgaaaaaggatttgggttcccagcaagggattgagctagggaactcaggcccttttgtcaatctttgttttgatttacctgcctcaacactggcccaggtagttgttggtcagctttcttactgtaacctttgccttctgatttttttttttttaaatatttctccaatctggggtaaacatagaaaattggtttgaggctctctaatattgggggcccagcaggggctctctttggtccactcaacctttgatagtgtgttaaggtctttgttttacctcataaatttccatttatttcattccatttcttaataaccaactaaagattcccaacctgctgggatgggtcccatgaccctccccttcttttttctcttagttttacccctatcaacttttttttttttwaaaaaaaccttactttttaataagcagttaaaatgtttcaccttcctaggatgagtccttggattatatatttatattttgcttttccccatgctgttgttaattatcctaatgtttttattagtgtctgtaaaacagatgaggggaagttaaaccagcacatttgatacagcttccttaactgtctttcagtttgtagcagcaatggtgtgcccgtgcaggaggggaccccttaactacagtacttgacatgacctgggtaaagggcatattcagcaggtgaatatccttgtcatcataaagccagttccacctggcttgcatacaaagcatatcagttgcttcatctagggtgctcaattgggcatttatagggaaagttgggaaatcccccttctcaggatacacagaccttacaaatgtcttttacccagtccatcaggccagctattgcctctggagtagcctcctgtgtctggattatttatagccacctgtgattgtccaatagtgaactgtgggtcctgcatcaacccaaacaggctcttctactctgcagcatttaaaaccaaagatacggcccctaaattattactctcacaatccatttcagttccttaggaagcggataataccgatcttcaaaatagaccagttctttcacattataccttctggtttcagtcgttacttggttttgcccttccctcacatgaaatatcagatactcacatacatacacattatatacacatgacatgttgttttcaactgagcttttttttcttctttctttgtgttttttgtttttgttttgtttttgttttttttttcagagatggggtctcgctctgtcacccaggctacagtgcagtggtgtaatcatggttcactgtagccttgaagtcctgagtactttcatggtaaccataggtctcagaggtactttcttttgtccctgccataattttccccttcatgggtagttttgaggctaggagccagagctcagacagactcacatctgagcttggttcagcctcaagacccaacccagtgctctcttttaatttcatttcagctgttagagataacaataacaggaattaaatatttcactttctgcttctttgtgtgcctttcctaatgcagtcagagaaccagcttcccagagtttgatccatccctgaattcttctgctaacttttacctttagtaactgaatgccgcacagctgctgcgccataccggggtgaccatgtggccagctaggaatcaaaagctcctcattctccatatcatatcatttctccttctttttgaaacaacctttaaataamctctaaactaggcaaaattatttttcctttaagccaaaaccatacatctgtgttcctttataaccttctttaccaaagcacatctttctttatacattctgtatatagaattatatctagtagttttaattacatggattaactactattttaactcttagtaaccccaatttccagtgaataacctatgactatttaatataatatgactttaagattttaagttactgaaaaacatttggaaactagtttcatttaccaaagattactaaagtcacagcagctaaaagccatttctatttttttctgagttctttcatatattttggcagtgaaatatcacatgcatatgacacatcttattttcagtttagtttcttttttctttttttgttttgttttgttttctgagataaggtcttgctctgtcacccacgctgtagtgcagtggtgtgatcatagctcactatagccttgaacttagttaagtgatcctcccaccccagcctcctgaatagctggcactacaggcacgcaccactaagcccagttaatttttacattttgtgtagagatgtggtctcattttgttcctcagggtggtcttgaattcttgacttctagcaatcttcctgccttggcctcccaaattgctgggattacaggcgtgagccactgcgtctggccagtttgtttcttaattcaattactgactttagagtggagccctttaaggaaaagggctaaaaaagtatgcagttttttagggcctaatatttattggaaggcagaacactcacatccccgcaaaagccaaagaaatcagataacacaatacaaaagagagaagagttttagacctggaaagaatgtctgctatgcaactcttggggttccattaagaaaaacagaggctcctcgcaaaaaggagtctgtggtgcgttttctgttttctcccaagggagtctaggctgtcagaaattccttttttttwaggtcttttatgtggcattgagagtggcaagaaaaaagagggacaggcagaagcaaatggagaaacagaattcagttgacagagtttaacagagaaaaaacagaggccttataacaacacgtgtatacctatataccccaaatactagttttcactaagttatacatatataccccaaataccagttttcactaagttgacttttgactatagagctcttaaaaaaaaatctttttttttttttgagccggaatctcactctgtcgcccaggctggaatgcaatggcgtgatctcagctcactgcaagctccccctcctgggttcacgccattctcctgcctcagcctcccgagtagctgggactactggcgcctgccgccacgccccgctaattttttgtatttttagtagagacggggtttcaccgtgtcagccagggtgatctcgatctcctgacctcgtgatctgcccgcctcggcctcccaaagtgctgggattacaggcgtcagccacagcgcccggccaaaaaaaattttttcctagttgtaattcctactcaaaccgttttacttttgcttctgatgctagcagggctctcattgtcaaaagagcacctcacagaagcagccatccactgcagcagctgcccttccttagtgcatgtgatggacagctttccgctgacagtcgctctaaacgtgcctatgtttttgacgtgtcccgtactcatgcgtaagtgtctgaaaggtgagtcacaccattccaggaagtgacagccacctaggacctcccccatggatgcttcattccctttgctcatttcttggtctttcagctcctgatctggctccccacatgtttcgtggtagccaggtctatgcaaacctacccccaagtccatggcagctgacaggctaaagaaagaggatgacaaatccagtttcttagaaagaaacatttaatagagactcacgaacggaagccatgtctgtgtcctggatggtggctagacaagatggcggatccccactgcaaaagtttctctaagtttcaaaaggtcaaggcctagatcagcactagcaaaagcagcaggaacaactttagtgaaatcactaagacagaattcgcacaaggaactcaatgtctgtacaagtgagtaacctctaaaatagcagtccataagggtagggttgggggtggtggtcagaggttctctttgagattctgaacgctttatggatgcttcatccaggaaaaggcataatcaaattttgcatatgaytttggggcttgttagactcctctggcagtccatccatggtatgaaacttggctaccctttgatttgtcactcagccctccatttactcagctccactcacacttagatgattatatattatacattatattgtattccttgatttcaatagaatattatctagcagacatactaatattttggttatttactatatatgaaagacacaacttctttcttttctttttttttttttgaggcggagttttgctcttgttgcccaggctggagtgcaggggcatgatctcagctcactacaacctctgcctcctgggttcaagcgattctcctgcctcagcctcccaagtagctgggattgcaggctcccaccaccatgcctggctaattttaaaaatatttttagtagagacggggtttcacaatattggccaggctagtctcgaactcctgacctctggtggtccacccgccttggcctcccaaagtgctgggattacaggtgtgagccactgcacccagctgacacaacttctttctaaataatctttatgcaacttataagttataatccttattatcctgacttacragtatgacccaatctttgaatttagtttctttgtttactcgtcaaataatctctcatttttaattgtaagaaattagttctgtaacataagtgagcctgaaagaaagagaacaggctccgataatggagtagtttttatcagacttatcttcccagtagtcccacactgtcccactcacacacagtcacrctcagtgccttcccaggggcagcccatagcagaataggatgcacactactctgggatggaaggaaaggcaagacttcaaggactgggctgcctagccaaacctctttggtgtgttgcatgaaatttttgaagtttttatggatattggaggcaagaagagatacaataagaagctcaattaactaaatgacttttttatcaaaacttcatctcaccctaaatgggctttcagtcatctccctagtctcacaagtgagcactgagggatccttgccctggaattagtcagttctctatgaataggcatttaagaacatttctctctgtagctagaatgtcaggtcagctacctgggcatttacttggtttctgtcctgatagagcccaagtgcttatgtgataacctaattctctcaccttgtcctcctgttcttatgatatttaaaaagtcttttccttgacttattcttcaataattgtgtcattttggttcctgccaggttagcggcttccttgctttcgattctgacttcattgtgtcccctaatccctaaatgccttcttgatttcagcccacttcctttctgacctccagtggcactggcgtgtgtacagacacactgagttccatttacatgtgcctaggactgtgcactcacttagcctcacactcatccacactcacatccccactttcccacaatcactcacrctcagtgtcctccatttactcagccccactcactctcgcccaaccrtacacacttgttccattcactcacactcctggtcgttcccttcacactcacactccttcacattcatgaccagccaccccactggcytccatttagtactactcggtctcacccagccctacccatatgcacaccagagtcagctcactcacagtcgcacagtcagtccctcaaatgcagtcactccctcaggaactccttccctctcactcaggtacaatgtctcattcatcctcagtgcccttcacacacttcatatacacactgggcatgtgtcacacccactcacacaaacttcaggcacagccagtcctacccacacttattcacgcttatttcactcatgcccagccccacccactcacacctagtcacactcacatgtggtcccaaacagttccagtatacctagactcacacagtcctactcatacctagtcacactcagtcacgctcacacatggtcccgcacagttccaatacacctagcctcacacagtcctatgcatacctagtcacactcagtcacatgcatacatggtcccacccactcacactcacacctagtcacactcacatatggtcccacaccgttccaatacacctggtttcacacagtccttctgacacctagtcacactcagtcacactcacacatggtcccacacaatcacactcacactagtcatactctattctactacctctcagagaattccactctattctactctctcggtgtcatttgtcccctcaggaggatgcagcattcaaggttctatcttggaagcagagactgtgccctcaccagatgctgaacctgctgagcaccctgatcttccacttcaccttcatcagaactgtgagaattaactttctattatttataaattactcagtctaagatattttgttatagcagcaggatcagattgagacaaggaatttataccaatttagactatgcatgaatccacaagaatccaagtggcacaagaatctagcaccaaaatggcagctcagggaaagctgattcagtttaacgttcaaaagaagaggcaaaactaattctagaaacttgttcccttgagatgctcggagacgtgccctggtttagaaagaaaatacagaatggaagctttgctctaaaagacaggttcttgcattagaaaaagggttacttcggactcactggctctaaataaattagtcaggagaaaactaatgaatgttaccatggaattatccataggacttaaccttctcaaaatagttgtgagtgggatgaaagagcaacaatgagttaaccagagacactggaaggtgttaattagaaaaaaaatatatcgtatagaaacaaatgttggtacaagcatacaagtaaaattttcaactgtgtcattaatactttcattgtataattaatttctagggtgctaagaattctgaatttattgaggaaataaatgtctgattgcaacaaaagaaaacttgtctggctttgggaaggaagaggcttaggaaaaaaattaaaggcgtctttactagaagttcaaggtgaaaacactgcattttttctagtacttcactacgtaatctaaagaagtctggaaaggagccaatgcattaaaaatatagctagaggaaaccgttcagggagaagacttgtggcagtagcagtctgtgcaaacattctctttctctttctgtctttccaagcaaaaattaaaccttgattatccctttataaaaatagggtactcatttcccagtgaaatgtgggaactgcttctctttagcagcatagtacccaattattcttacagaaaataattttatgtaatttaaaaaatatactgtcttcttggtatgattgttctttttgtgtgtacagataaccgcatttaaagaaatatttaaaactctatcttggatttcttgaaggtttctggtttgattaggccatctgagtagataaataacgaaatgatgctaatgtgttgacacaagaaacaatgttcaaaggtagacaccacccaggtgacatttctcattgctacacatatgtatatacgtgtgtatgtgtgtgcatatttacatacctttgggaagatacaggtgtagccagaatgctctcacatggtcgtcattatcaaaattctcccaatatatccatctcttcactttttgaggtcatggtcggattgaattccatgatttcatggttctattgtatctgtgtgggaaccatgtgactagttttaagaaaatattatgagcaaaggtgactttggttactctctggttaattgcaagtctctctggggcaccctttaactctgtgatgtttgaatggtgactgctttatgagcctgagtctctgaataagtaaaaggagcagaatcccctgttaacctgttatggacatgagtaagaaagaaatctttcttgtttgagtcatcaaaactatgggattgtttgttattgcagcataccgtagccctattcagacttctataatctgatagtaagggcagatttggggacaatttaccaaaatcagaattataattctggtgactcagtttgggaaaagaaattccatttgacatccagagattccatctccagaaatcaagagcaattgcttcgatttttacagattcctatttgtttttggactagactccaaagaatttgttgtactgtataatttttaagaaacttaggctgaataaatcacctgaaaaattcatttttgcctgtagagctgctcatggactatgttgaatagtagaaaccagttcttaccacgttggttatgccacaggcaatgccagtttttcttagcaaagttgaactaactataactttgatttataatatatgttaatatgatgcaaaaatgatagttcttttgtttgggtctttcactgaacacattttattgattgcagagttgtacagccaaagatattatagagagggttgtgggatgcctaaaaatgctgagtttgttggcagaatcgagatgactcctaatttctaacagtgtcatttttctgaggcaggagccaaatgttatattgttttagccaagcttcttgaaatattagtctataatttctttccttgctttctgacactcttacttacagtcatcaagttttagtcaccatctcgacaccaaacatgcactggaaaaggtctctaatttactccagagcaacaagatctttgggtacatttcggacttcctattttgatctcctggaagctttagaaactgacacataattgtttatgtcaactttattggatcgcagggtccccatatatttggataaacattatttcttgtgtgaaacaacagagtgaggttgtttctggatgagattagtgtttgaattgggagactgggtgaagcgcattgcccttcccagtgtggctgtgcatcttaccatctgtggagggcctggacagaatgaaagggtggagaaagggagaattcgctctctctgcttgagctgggaaattaatctcatcctgctgaaagcaggggtttaacgtttagacattaaactggggtttccaccatctggactcctggttcttgggcctttaaacttggactggaattatacactggggtttcctaggtttctagcttgcagatggaagattatgggacttctcagcctccataattatgtgagccaattcctgtaataaatctctttatacagatagatatagatgtgtatctgtatatatgtctatcatctatctgtctgatcatctatctcctatttgttctgtttctctagagaaccctgactgatatactaaccaatcattgccttcttgaaactctttcctaccattgttccttgacagaagtctggcttggaggttctgtttcttcactggaatcttctactccatatccttaggctccttttcctctccttaccatttaaatattggttagtattattktcttttcattccactacctgaatactgatgatttacaaatctttttctccatcataaagcttagtcatgggtacaagaagtacattaaagatatgcacctcctgctactttgattaggatgttctatggggcttctatattcaacccatccaacagaattcatgatcttcccctccctgaacatctccactcaaagtctgttctttcttttatatttccattcttgaggaatgaaacctccatctgctgagctattaagccagaaacatgagagtaattatagaaccttcatatataagtgtttaaatactattgtttcaactgcctaaatatctcttgaatttatctctcccccaatatcctcattaaagcttccatatttctctgtctttttccccatgaattagtagagatgctccctgaccagttcactttcctcctgtcttagcttcccaatttaccttccacagggcagtcagaatgatctttccaaagacaaatcagaatatttcccttccttgaggaaaaacctgtcaatgtttctgcattgatttaggattatactccaaactcctttatgtggtgcacaatgctcctgagggcctagaactttactggttttagccctgaaattctcaccatcacagacaaagcctcattccctgggcaaactgcagtggtttatcgtcccagctcaaaatatctttttcgttctggtcttcttgacttgtcttcaaggttctgcttaagttgattttttctaaaatcatatcccaaccaattttttctctagcctgaaatgtgtatacagtgcttgtatgtcctctaagaaaagggattatcatattctactttaatctggtcttgctatactttgtgctttttaaagagagatgctctattgttttcatctctacatctcaaacacatctagcacagtgattagcacatagccattgataaatatttgttgtatgatattagaaaaactcagggcatccatcttcatgctgtattcaataagtaacataactctttgctgattaacttagtattttcacatttttattgttttcactttgaaatacaatcttttatttttcctcttctgttttactaccattatttaactcaaaaatagtggttatttttcttgttctcttagtagatcccccgtaatatgtttaaacttatttgaacatttcctgcttcttccatcctaaaagatgtagacatgtttagaataattaagaatatttgcaaaaaggatttcttacaacacttagtgaggaccaaaaatgtaccaggttctgtgaaacctaagtgtaaactgaggaattttgactcctgccctacaaaaatttacaatccaggcagtaaagctgaacagtctagcctgaaaatctrttttaaaactgttttcccccagtccgaagatataaccttgaagcttactgcaaaccccccttttttttcttctccttagtcttaaaatatggccttggagtgtactttctttgaaacaccatgtccctccctttcctgccatacactccctcacctcgtgcacatttatctaactgtatgcttgtatctaattatgtgcttacttagaagttccaaggggctaatcttaaaacagacaaagcatagagacccagctgccaaattccagagattacctcaaggcagttagtcatcaaccyggccagtgctgagatgacaccagcctgtgctccagatggcccaaggcttgagatagcacaaaacattcagaccttggactcagcatccctccctcatgcctcccattccaagttcccttttgtaagcccctctttccagcctaaagtttgaagtggttcctagaggcaaaagccagctgcgtccccactgttagctttggaaaataaagtcactttccttttcactgcacttcattcttgttactgcttttgcaagtggtgagtagctgagcatgagcttggttacaaggcaagcatatgctcttaagaatttcattttaaaaagcccaaaattatgaatatataatctaatgacctgggaatctcttcctgtaatatacaaaatgtcttttagggataaatagaggtgggatatttagttttttcttaggtgccaaacacaaccaaaaaaggcatatttgaaacaaaactgaatatttcccttttcctttcattgatttgttttaaattttagctgtcctgttttgaattttcaagagcttcttgtctctcattattccttttaaatagtattctgttctttgttactgacataaactcatttctcagagaatagtaatggccaattaaaaaaaatkctttcttataccctgcattgcctctttttcctttgtattcctattttttcttttttcccctatttctaaatttttttctgctggaaatttctctaaaacacttgtggcagtcatgtttgaagattgaagcaatagaaagttgattggaagctgcaggccaggggaacttatttgctgataatttacagggtagtccaggggaactcagctctttcattagaagccttcaaatttggagtgtcttttctttgggactatttgatttattctagggaggcatcctctcatatactatcttgggatggggctttaagcccagctctagcattctataagcagggaggaggaaggaggctgaggctggatctactattcactgtgaaactgcttattcagtcctattgtcagctccatgttcccaccttcctaccttctacttaggcctggtgccctaaatctgaagccttcagatcctgtcctttaaggaagcagtaatggtgggggtgagatgtgagagggataaccaccaagctgccaaggatgcaaggatggttgagagtggcctatagatttttttttttttttgacagtcttgctctgtcccccaggctggaatgcagtagcatgatcttggctcactgcaacctctgcctcccaggctcaagcaattctcatgcctcagcttcccaagtagctgggagtacaggtgcaccccactacctttgactaatttttgtattttttgtagagacgggattttgccatgttggccagtcttgtctcaaactcctggcttcaagtgatccaccagccttagcctcccraagtgctggcatcaggtgtgggccatggtgcccagcctgatctaatattttcacataaagaattttaattaatgcctctggttataatcatatacatcttactcctatttgaactattttgataggagtaactattttgatagttcaaatccagagtctttcaaggagtcctctttgtagamcactctgttcatacttctttcatatattaagtctgttactaatcctatatctgttttctatcttttaaaaaattattgaagtctttcaatttcagtagtcttatattattttcttctccttggaacttgtaccttttatattttatttctcatattgttatttggggaaaatttcaggacagagaagaaatagatgtacatattcaatctactattgttccaaataaatttattatgcttttgtttgctaattttcctttgccacattcactggttatgtgaagaacatactctactacttattccttctaaagcaatgacactttaaattygtcctttccagtcactgtttaagtgcaatgagtgtgttgttggcaacataaggcaacacctttatagaacacggcctatagatgaatgagaaactaaccttctttagaaattctagaaaaaatcaacttgcaaatatatctaatcactaaaagcatattctgtgcagatagtctttatttactagttatcaaagggttattttcatgcaaaataaaaatataccaataaaagccttaaaactttggagagctgattttctacttcatgttttttttttgaaatgtcagacatgactaaggagtgaggtctttttcttttctttctgtatagatataaaaccccctttcaatctccaggttttgttgattttgttccctattttttttttttactttctattgcctgcactctggtaaaatcaccctcaccactcactggctgtaatgaaaatggcaaatacattccgtgcagcctgtcttcccctagcccagcctgttcttcacactgccatcataatgatgttttaaagacaattataatcataatcctagagcagagattgttaacctgaaatcatccatggttgatcaactttgtaagtctgtgaatcccttacattatagaaaaaaagtagtgtttatgattattttatttaggggagaagcctaggtatttcatcatatccttgaaagagtctgtgacacctccaactgttaaaaatcactccacagagaatcaagttgatgaataatgatgagaatagccgatgatcttaacacacatgactaccaaaatctctattatttttctggaaacatgattactagaaatctaaatggcatctgtgattgattggtattctcttccccccacataagagtggcagaagaatgactgttagccaagtgtctgtcaaaatgaactacaaacatattcattaggaaacaggttgttaaaatggatcaggtataaatatgttttgcatatcacaaaagacacctaaattaaggaaagctgtgaaagagcagatagccatttttcaattatatatgaccaatgtggcattttttgatatcttagtcagtaatttgaaggtctagaaatgccatacgtgcctatgtaatttggggtcactgcttttgatacaggcagtgagtctagaaatttctacctcactcagaacaatcatgctatgactttttcctacttgtgcaattaccaagatttcacaccatttaacacttttatgtttatgcacatgaatatttacagggaaatagacttgggcattaaaaaaaaaagtcattcagcttccttgacttcatcaggttgtttgtggaggggctatttcacaaacacacaagctacaaatcaaaggtatatgacacctttttatattatcaggcaacatggtgataaaaaaatgaaatggagtttgtgaattttattactccgggtgacaatttaatatgtgggtgatggtgtgcagctcccaaatgagatttgttgcatcctcagaactgcataaaatgtctaaagagaggggcaagcttccatgccatatatagacagactcattggatctcccgaggaagtcagattggaaacttgtaagtccatagtcattcacagatgataaagtgtgtgaagtggggagcagggagaggccgtgcttgcatgaagaattttaatgacttaacgtttcttctcttcttattaattttagcgtagggagggcagtgggataaggaagtcatcagtcttgcatatgtctttttctgctacagatggtacaatggttgatttggtacaaggatcataccaaatatgtatgcaggaagccaaaaaatagaatcaaatcaaacatgattttatagttgttattattcctaaaaatatctgtgctcctgtaggcatatgtcttagataggagaatgctgttggaatttctggtctctgcattgaggggctgttggtcttttggaaagatgtgcttattgaatgggacaagcttgccccaagaggcattgctagggctgctcccagacctacttgtgattcaaggctgtgcttctcctctgcacgtgagacaggtgagttatgttacttgctaggtaagaaggaggggaggagataagttacctgaaatcatctgatgcattattatccccttcagtatggacataacgtcagaagaggatcactgaatcagataggrtaaagcattctttcgacctccctgctgggggcttgtctgtcctgttgtgctgtacttctgtgcaggtggaaacaagatgaactcaaaccacttgtctgattaaatgggccaactgtttcagtcattgcccaaataaacggtgtttctgtgccaactttcatgtgtatactttggaggaaattgttacttcatattctaatctcatctttttcatgggagtcttagaagtattggaaagctgttttgaaatcctttttaaaacctaagattgagcctcacaatttttttcctttatataggtattctcagtttaaattgctttacatttttactttttcatttcacaaatagaaggtaatttattttgttcctctttgagggtgctaaaatgggatcactgattagaaactgataaccacccacttgagccagaattcctatcttcttatgaaacagcgctaaaacatttgatgtaaaattcctcagtatttttcagatcagaccctcattcatttaaaaaatttacctacctgtgaaagatcagaacctgtactttcaggctactgttcccttattaaatcagtgagcaaatgcccttaaaagggacattcaattgaaatttaaaaaaaaaacattatttgagtgcctgttgtatgtcaagccccttgtaaagcactggggagaaaaaagcaaatattatagcgtataggaaagtaagtaaagatatttaacaaacaaccctaacgcaatgtgataagtgctgtgatagggaatttggctctgtgatttcagtgtcagtggatttcttattcagttaatctcatctgccaaagaaaatatttttgtaatgaggaaatgtcacctctgttcaccattggaaattactatttatcaagttgtcatttacttggataatgttatcaggtattgtctagcagacaatatagagggaaaatagaactatcttcaatagagccccctttgacttgtaaactatgatactcataatgtttagtgcatggtgtatatttagcttcctgcccatctggtcttttgttgagggactgaacaattggtttccataagatccagtattaatgagagccctcattgtggttatttttattactctctttcttgagcagtttttttttccaaatgagaatatttactgggtacaaatgtaattgcttcagagatttccagaaaaggtgctaaattcgtccttatcccaaagctgaattttagttgatcttttttcctcaccgactttttcagttttgtttttcaccactttcaaataagaatcagttgcatgttccaatcctggaggtctctgagtttccaaactctgaagaaaggggcaagaaaggaagagttagggatgttagaagagttagaagagttacgaatgttcctatgtgccttccgtctgtcttatacctgctgcgtgaggagctgacgccaacacccaaagccctggacaaagacttcctccacagtcactttcctctgacccacaggaacctccttggctcctctccctcttgccttcacagcttgacttccccttgtcatcttgccctgttaggatctagcaccctcagagctgctctggaaaccccatagggcctatctctgccacttgtactactccactcgctctcagtaatgtgggtgtgaggtgcctcgtccccttgcctagccctttcataacatggctggaaagtcttgtatgtgctgtccccaaaacagatcagacaatgttgacccaacagaaggagcatggtcacctcagtcccggtgggggttgggggtagggggtcgggggagccagtgagggggaagcgcacagtgaaggaggccttggatttggagacaaaaytcattttgggagcctggaagctctctggaactggacacaaactcttgtctctgtagtttgcttacccagggaacttgggtaagagctagtgaataactcgtatatgtattatatgaccttaataagtaatattgtttagcctgagtttttgatacagttttcaactgcatgatgttctaactctgtctgagtttcacagaattatttctccagagtaaattgacttattcttctgagcagagcccaggtagcctagttatcttaactgtgaggaactgatagagctctctatctccttgggggatgtttaaaaatacataaagcaaaattatatcaccttaagaacgttatggtgatataacattcttatcaccatgcttttaacatgcagtcagccctgccaaattttcctctgccattgagaattggagtaattattataagtgcagacaamactaggtttctcttgcaggcagatttttgtgattgcaccctggactttcgttcagaattcttttcagtttcttaggaaagctaaatgaaattgctgcagtaaggccagaggggggcaccaaataatcgtgattgatagagtggtttggctgagcatttgcgggaggctcaggcatcaggcctgtgagcctctgtgtctgttttgagcattttgggcataaaacatattgaagtctctttgtttacggaatcgtcgtcaagccaggagctgacacccgagcttcagtggcccaaaacatactcagctaatggggaagcagcagttggcaggttctgtggttgtaaacattttagaaaaatttcttcacgctttttagctccttccttatttcacttatcagagttgaattgtgggaagaactgagaaacaaactctgccatgctcttggaaggcgagaatgcagatgggtcgttctttctgagacagaggaattattggcaattttctaggattaattgttcttgataaattgctgaaatatctatttggtcctcaggaaactggggagcattcaataccatttaaagtgtttctgcattattggctatttcagaaaagttggcttcctctgctgtacttcctaaagccagatttctaaattcaatacaactttcaaagctattctaccacaattgttgcaatttatctagtatggaaaagtagtgtttcatgtttgttggtagttactactccttgtgatctgtagtttgcttagatgtccttatttatagtgaattaatttagggcagtgggcaggggccagggcaaaggagttggaatgtcctctattcaattgaggagggtctaggtacgcttacttcattctttgtcagtacatgatggattctaagtcttcttgcaaaatacgtgtgaacacaaaagtgattaattatgatcatgtcaaatttgaaactgatttaagtcctgaactataatctgtcacctcagttttccttttagactttttgtatggtttaggaatatttcaaaagtgtcctttgaccatctcttttcataaagtaaaatctgtgatcatggggttacacgacaagtcagttgatgcacacagaacaatgctgactcagggagacagaggctgtgagggttcttataaatgctgaccccttcatatgccgacatgttcacttagtgtttacgaacttgagctccggagccagactacttgggtacttgggtaggaatgtaggccctaccacttattatctatatgactttggcaagttagtgagcttctgtgtgcctcagtttcctcatccataaagtggagtaatgctagtatcatagagttagcctgagaattagatgagttattatatgtaaagcagttagaatagaacctggtgtatactacttcataagtacatgctaaataaatattttaggtcaggcagggtggctcatgcctggaattctagcactttgggaggccgaggtgggtggattgtctgagctcaggagttcaagaccagcctgggcaaaatggtgaaacccagtctctactaaaatacaaaaaattagccgggcgcggttgtgtgcgtctgtaatcccagctacttgggaggctgaggcaccagaactgcttgaacccaggaggtggaggttgcagtgagccaagatcatmctactgcattccagcctgggtgagattactagactctgtctcaaaaaaaataaaaaaaattttaaaagtgatataaaaactattatgtcagtcctatagaatttttccagagaaatttaccatcaggtgatttttatatgggcatatattgacttagttgtttcctgtgcctggcttcctggctggtatcttaggaccctgctgttcttttatgcctatagaaacctttggcagggcgcggtggctcgcgcctgtaatccgagcactttggggggccaaggcgggcggatcacgaggtcaggagagcaagaccatgctggctaacacagggataccccatctctactaaacacacacacacacacacacacacgcaaattaaccgggcgtggtggcgggcgcctgtggtaccagctactcaggaggccgaggcaggagaattgagtgaacctgggaggcggagcttgcagtgagctgagattgtgccactgcactccaacctgggcaacagaacgagacttcgtctccaaaaaaaaaaaaaaaaaaaaaagaaagaaacttttaagagacaagaaatagaacaatcaaaatcttgtacaaagatcatattacaaccgactcttcaacataatttatttaacaaacattcatatagcacttactatgtgccacacactgttttaaacactgtacaaatattaactcattgaatcctcattataacagaatacttgttgaatttcaattaagtgatgtgggaaaatcctctagcctggtgtctgacatgataatcctttaataaatatttgttgaaggaatgaatacctgtgagtgactcaatcaatcagtctatcttgtttggctaataaaaaaagcaaataatataccaggatgttatattaagtggcctaatgtgttctcagaaactggaaacaattgagactctttatccacagctgtattcagtttgtactgaagggactaaagtggcctaaatgtgcctgttcctttctgaatattaagtcacttgctattttgatattaagcttagatgtttagatgtcgtagaattggtgaagtcttggtgacttgtaggctgttacattcaacttatattgaatatcttagtrtaccattctaaatttccatttttatctttattttggattttgagcagacagtattatgattctgtttaagacatgaagacatgccaattttcctacactctttcaattgcattcttttgttttaatcttggaaaacatatttgcatcatatttcttaatttgtcacagcctgagaagtgacattattgaatgacagtaggagcttgaatattgtrctttgaaatgccattgaggataccattattcatgtgacagccctgagaagattagcaaataactacttaacattttataatgctttatcatcataaaaatccacatattaaacttgaggaataaattacttaaaaatatatcatttctattcaaacaccatttggaaaaacttgagagataaatgccagtttttaatgaagctacaataaatgtttttattcaccatgttattgctccagtcaattgtagattatttttataatcactaaattagctgcatttagccttaaacctacttgttgaaacacagttaacatggtagaagagaaccaatgtaataatagtctaagacttcaatagtctctgtgcctgtctctcttttctcttcctttctaggtactagttgaaatgatctcttcctaatctatgacaagtatctgggaatgtggaatttaatttaattattattattattttttgagatggagtctcgcactgtcacccaggctggagtgcagtggcgcggtcttggcccactgcaacctctgcctcctgggttcaagcgattctcctgcgcccaccaccacgcccagctaatttttttttatttttcatagagatggagttccaccgtgttagccaggatggtcttgatctcctgacctcgtgatccgcctgcctcggcctcccaaagtgctgggattacaggtgtgagtcaccgcacccggtggaatttagtttttaaaaatgaaagtgttgagatgtggtactgaagggcacgtggaaaagagtgggtaactttccacgaggagctcaggtccctttggtggctatgaagaagtggagaggaaaaatcaaaactgtaaactcttatctctgaaattaaatattgttgatactgccagagtagacatgggattgtgggcaattcctggtttcagggaagtcaacaaatcttctgaagttacaatgtagttaaaaataacagttgaggagtgggattgccctgtgcctcatccagtggtcagaggtgtagagtgggttgaagtttataaactgacagtcaataaaatctgccccaacccaggcaagtaactggcaggcttgaagcctgagaagaagctatttaagtaaaccctaaaaattctagtgcaatttgacacccttgtttcagtatagctctgggatagaggcagaggggtggtctcctgactgcatggtggaggtttttgatgggatgaggggcagagtgatgaaaagatgacattattggtaagtccagatttcagttgtgaactgatacttcaagttttggtagtactgacagtggacagcccctcaataggatgaacaggtttctgatagggactgtgacaccttctagctttaaataagacatctgaattctgtctccagagataagaggcacagactgttggtcttagatgctaggattctgggatattacagaatggtagtatggggcgggctgtctggaaggaagatactggacttgtttagtttggttataagcttgtccatgtcagtatttaataaacattcaggtggctcaacaaattttgtggaaaaaatattgcatgacagtaggagcttgaatattgtgctttgaaataccattgaggatatcattattcatgtgacagtctgtggagtaggagccttaagttcagattacccatccgtatatccactcccacacatatatattcaaacatgccgtaaattctcatttactcccttctgcctcttttccttccagaatgaaggaatctcttgacaaatgtgccccctcctcgccctcaccactcacacccatattaagtcagattggtcccctcagcatccctgaacttgccttgttcatcatcatcctaaaatacttctcatgctatttctcttacctggttgttctcagctttctctttttgcctctgcgaatattatccattctttaaagttgaatgacccttctttggctacttttccaagcttgtgccctttctacaacttcatctgtcttaatagattgaaaacttcttcagagtaagggccacatctttgttttcttctttgctatattctgtgtactgtaccacactctggtgatgtgtgactataagccaggtaatgaaaaatcctgatttttgcaaaaaggaaaattttgcttaatctgctttgtagtctctaaataaacttagccactgccttcacaaattacaaattgcttctgataagttcatttttaaaaatggtatcaaaagtccccttttgttttgttttacatttatccccttgaaattctccttgaccataatcatggtcaaagacttgaaatagttggaagtttcctcaggtggacaaaggtgctgagattagatgttctaaaacataacttcagtagtcattaaggccataatctgaattaagtttcctagtaaattactgaagaatgcttatttaagtcttctgatcactgtaccttgtatgtatcaagatatcgttttgtatcccatgaatatgtacaattattatttgtcaattaaataaaaaattttaaaacacacataaaaataaagttatctgaaagctattcatctaaaactgatccaattagacagatgtatcactgcaagctacagtgctcaaatttatgayattcatagtgaaataatttactgttacaatatatttaagctccctggaaccttaatgtcaaccatattgttaggcacacatagtaggttctcaataaatatttggtggaaaattgatgtattttaatgtatgtatatttgagtgagctatttctgtttttggtgtcctgtcctgatttatagtgaaatctctcagtctagattattttggcacattgccaaacataatgtaatgaaatagaaaattctgttcatactaatttatgaccaaatctaaaacctctttgaaattagtagaggtgcctttgtcttcacagagcttggaagacaatgaactatttttcacagagattatatttagttattttctttttgtaattgtattttagcacaaactgacaaacaactacatcagcattatcgtctttatcctgtattcacgaacatttaaattaaattagtattctttaggttacatatgacataacttaaaattttttctggataaatggttatttttatagttgcattatggactttggcattattcaaagaatacataatttaaattctgacaagcttttaaaacattttcttctaagcaakgcctgcaaattagtcttttctttccctttttagactggggctgtggctgagatgtcacatggcagataggatcacaaatttctgttgtatctggatggagatcagcaggaggatctatgggtgagaagaagcacagttacagatggattctagagcctgcttgctgacacaggcttgcaactgcggactttataagcttagtttttaatctgctatcagctagcataataccataaatgcataaraaactaagtattcagtcttamgagaaatgctatcttgacctgaccctttctccaaataaattgacaaaatatctcatcgtctaggatgccagacagaaataccagttgcaatgttttgttgcataaagtttatcctaatttaaattagtggcatataaagtcatcatcttgcttgaacaaacatcttattaaattgagcatgtcttttatcccatgaaatgaaattaattttgagatagttatttttcagttggaaatttattgagttgatagaaaacaagttatatagtcttccaaagaatatgttacatccatttgcattttgtttttcttcagcaatgtttggtttttagaaaatcttacaagttaaatatactaatgtagaaattgaaagaaaataatcagagatagagcaataaatttgcaaataaagattattcttaaaacaaatgtttactgtagttttatttatataaaaaatcccaaactacccaagtcttcaaataataaagacactgttaaaaaactgttacctttccatttatggattattaggtagactttaaaaatattttaaaagactttttaaagggctatgccattttccctaatgtaaaaacaaagtaaaacaccatgacgaacccccagaaaaccgacctgtatattcaatgtaccaaccaattgcatatacactagaatttttgtttgtaaatagatgagtgtgcataagacaatatgttaaagtacagacacttcctacctaatacagattgagttcttactatgtattcagttcccactatactctaggctcttggctaagcactttaagggccttatcacatttaatactcacaggagcacaatgagattgttctgggcaagccagaaaatcacactgtcagaaactgatttgctgggtgaatactttcagatcattttgaagttgaaaatcacaggcaaacactttgaagccatgtcagttgtgtattggaaggaattaaacatgcaaatgtaatgagtgcaatagattttaagagtctgttttttcggaggtgatgcagtaattgctgtggttgggactgtctcttgaagtggaaactagacaagtgggtttagacattaaaattcctaacagtggtttgctccctctgtagccttggatagagcacctgtcccttaacacattagagctcccataaaataaactgctttaccccagctaaaaggaacagtctctttgatggaacttgagctacagtcatggtgattttccactaggtacttcaaagaggacatcctctcctgaagaacagaagaacctgaaatgtttggagcctaaggtttctaggatcttcttttgccagtcttccccatttattgctctcctcccatcaaccacactgacagttgaagggttaaagagtggtgttgcatgagggtttgcackagggagtccattttctcctaagaattattatattacattatgttgccaagacatacaaatgaagaataactggttttaatacatagaagaatcaggcttgttttgcttctttaataataatacataaaaattggtggcaatttatttttgcatgtgaggaaaataaaacgcagagaagactgtaatttccctaaagtcacacatctactgcatgagagacagagtcagaatttcaacgcaggtctgtctggcttcaaagaccttcgttatttcagtagtgggaccatggatcatatttcttcctttaaaaaatatttcctcagtatttttctaaaccttagatgatgatattgcttttataattaagcaatacatgttatgaaaatagaaataaaatatttttatgtaagctgaagaaatgagaaaagagatttttcctgttaaggaaaaacaagttcctgttcttcttttctattgtagactgctgtgattgcacctgccatcttatgcagaaatgacctgaagacagactgaaacaacgtgttctacagcctgaaaatatctaccttgacttacagttttattaatgctggtgtgatcagactggacaaaaattagcatatgttattaactgatctaattcaagtgccaattcttaatagaaacacaaaacaataaaagcaattcagaaaatatttactatttgatttcttcaagctccaaacaggcttgtgcttagctgtagaaacttgaatatatacaaatctacatggatagaattcttagtcttctttgggccaggtgtgttagccccttgggaaaggataaagttttggaatatatttttattcatgaacctgctctctttaagacttctgaggaaaagagctgctgggcagatgagtagaatatgttactactgttccgacatgtctacccatcaaaactagctgatacagtacactttaatgacccttctatagtcaaaactgacattgacattgacattaacagaaaagatttgggacaaagaactgtgttcatgcagcaaatcagcctcaaacttcaccacaagctgcacattttatgctactgtattctgcttaagcacttatttgtatttatgtaaactgaatgatcctttaatacttaaggactttattctgggtgagttagaatcacactgttttggcaggaaaactctttgataggaaaaactgtatggcttgataatttaagagctaaaagtagccaaatcaggaactactgaaattcttcagtatctgttagaatatctcctgtttgagccatgtttgtaaatgatgttcaaaggcatttcaaaaacatgtaaattaaaaaaacaattcatttgattctgctatggtttaaatatatatatccctccaaaattcatatgttggaacttaaaccccaaggtgatggtgttaagaggtgagggctttgggagttattataattaggccaggagggctctgtcctcatgaatggcattaatgccattataaaggagacttcagaaagctgcctggcctttttctgtctcttctgccctgtaagtacacagcattcatcccttttgccctcccaccttttgccatgtaaagatgcagtaacatgcaggcaccatcttggaggcaagagcacagctctcaccagacactgaatctacctgcaccttgatcttggacttcccaacatccaactatgagaaataaatttttattatttataaattacccaatcttagtgttttgttatagcagtacaaacaaacagagacagattttgacagtcatataaaacctcaagtactttgtaaaaagaaaatataaatgttgaatgattgaagaacgtgaaagactggacagtgagaaaacatgggggtaggggttgtagaaatggagtggtattcagagacataactaatttaagctatctctaggacaaggttaaataacagaaaaatcaaatgggcctctgactggtagcgtgttttgtttgggtactaaggggtagagttgtattagtccattttcatgcagctaataaagacatacccgagattgagtaattaattaagaaaaaagaggtttaacggactcacagttccacatggctggggaggcttcacaatcayggtggaaggtgaaaagcatgtcttacatggtggcaggcaagagggaatgagagccaagtgaaagcagaaaccccttataaaaccatcagatcctgtgaggcttattcactaccacaagaacagtatggaggaaccacctccatgatttaattatctcccaccaggtccctcccacaacacgtgggaattatgggagctacagttcaagatgagatttgggtggggacacagccaaaccatatcaagagtgttcagctttaaagagtgcctgagagtatgggtccaggagtttggacatccacagctattgtgactcttggcataaattgataactttcaaaattaaaagaattcatcttaaactattagttcctctgaaattccagcaaaatactcaggtttgagaatttctgaccactgcctattagctttaggtcaataactagaagataattaggctaagagctctatcagttattttatatttggggtgatagatgtcaatatttacatgtatgatttaggtgcttttgtgtggatctttgcattgtggcaaattgaggaaacctagatatttggtatgattgatttggactgctagaaggagccttccctgtttttcaccacaaaaatattggttatttccatggcctcagtatcccaggaaaaagtgaatgaaatagctaaagggaaaactcctaggtaattacttctgttgattatttaatcttagtaaatataatatttgatagagattttaactgatcaaggagagaaaatattttttgttctgtatgaatgcaacctgataattctaccaaagcaagagtggaataaaaatctttccactgacacaggttgtggtggatatgggatgtagtacaacagaaaagaaaaacacagcctcacaatatagataatgcatagctgagagaaactttcctaggtaataagcatttgcagctaagatttcctagggtgttttggaagaaaacaactgccacagaaatgcagttgggaaagactatgttgaaattttgaattttgccatttgtaaaaagggaacaaatattatttgtgaattgtactgaaaacatggatataaagaagtgatcattggggggtggaggaggagctagccgggccggggggcagctgcacagtctccaggatccccaggcctggagtggggtccgtgcatggccagctggctctgccccacggccagtcctgagcaggcctcccttgggccagcccgatgtgactgagcccagcagaccctgagcaagaagcaggtccatcgcggagccagagggcaggaggaacatgacatcayggaaatggtttcacccaaatatcactggtgtggaggcagaaaacctactgttgacaagaggagttgatggcagtttttcggcaaggcctagtaaaagtaaccctggagacgtcacactttctgttagaagaaatggagctgtcacccacaccaagattcagaacactggtgattgctatgacctgtatggaggggagaagtttgccactttggctgagttggtccagtattacatggaacatcatgggcaattaaaagagaagaatggagatgttattgagcttaaaaatcctctgaactgtgcagatcctacttctcaaaggtggtttcatggacacctctctggaaaagaagcagagaaattgttaactgaaaaaggaaagcatagtagctttcttgtacgagagagccagagccaccctggagattttgttctctccgtgtgcaccggtgatgacaaaggagagagcaatgacggcaagtctaaagtgactcatgtcatgattcactgtcaggaactgaaatacgatgttggtggaggagaacggtttgatgctttgacagatcttgtggaacattagaagaagaatcctatggtggaaacactgggtacagtactacaactcaagcagccccttaacacgacttgtacaaatgctgctgaaatagaaagcagagttcgagaactaagcaaattagctgagaccacagataaagtcagacaaggcttttgggaagaatttgagacactgcaacaacaggagtgcaaacttctctacagccaaaaagagggtcgaaggcaagaaaacaaaaccaaaaatagatataaaggccgggcgcggtagctcacgccttgtaatcccagcactttgggaggccaaggcgggcggatcacaaggtcaggagatcgagaccaccctggccaacacggtgaaaccccctctctactaaaaatacaaaaattagccgggcgtggtggcacacccctgtaatcccagctactagggaggctgaggcaggagaatggcgtgaacccgagagtcagaggttgcagtgagccaagatcaccactgcactccaggctgggcgactgagcgagactccgtctcaaaaaaaaaaaaaaaaaaagatataaaaacaaaacatcctgccctttgatcatagggttgtcctacacaatggtgatcccagtgaggctgtttcagattacatcaacgcagatatcatcatgcctgaatttgaaaccaagtgcaacaatttgtagcccaaaaagagttacattgccccacaaggctgcctgcaaaacactgtgaatgacttttggcggatagtgttccaagaaaactcccaggtgattgtcatgacaacgaaagaagtggagagaggaaagagtaaatgtgtcaaatactggcccgatgagtatgctctaaaagaatatggcatcgtgcatgttaggaacgtcaaagaaagcaccactcatgactataagctaagaaaacttaaactttcaaagattggacaagggaatatggagagaatggtctggcaataccacttgtggacctggctgtaccacggagtgccctgcgaccccaaaggcatgctgcacttcctggacgaagtgcaccataagcaggagagcatcatggatgcagggctggtcgtggtgccctgcagtgctggcattggccagacagggacgttcattgtgattgatattcttattgacatcatcagagagaaaggtgttgactgcgaaattgacgttcccaaaaccatccagatggtgcggtctcagaggtcagagatggtccagacagaagcacagtaccgatttatctatacggtggtccagcatcatattgaaacactacagcgcaggattgaggaagagcagaaaagcaagaggaaagggcacgaatatacaaatattaagtattctctagtggaccagacgagtggggatcagagccccctcctgccttatactccaatgccaccctgtgcagaaatgagagaagagagtgccagagtctatgaaaacgtgggcctgatgcaacagcagaaacatttaagatgagaaaacctgccaaaacttcagcacagaaatagatgtggactttcaccctctccctaaaaagatcaagagcagacgcaataaagtttatgtgaagacagaatttggatttggaaggcttgtgttgtggttgactaccttttgataagcaaaatttgaaatcatttaaaaaccactgtattttaactcaacaatacctgcttcccaattactcatttcctcagataagaagaaatcatctctacaatgtagacaacgttgtattttatagaattttgttttaaattgaggaagcagttaaattgtgtgctatattttgcagattatggggattcaaattctagttataggtttttgttgttttttttttttttctttttataaccttaaccagtttaatttttttttcattgtggggcaaggtaagaagaaatgatttgggaaaattaagtaacaacatcctagaaaagtgagaacaatctcatctaccatcatgtatccagtagtggataattcattttgatggcttctacttttggctaaatgagaattaagccagtgcctgagactgccagaagcttactggtctacctttgcattagcattaaggagtcatagaaaaagaatcatggatatttatgaattaagataagaggtgtggctttttttttttttttcagccgatgaccaattacagttcagctgttgactgagaaggttgtggtgggaaaacatttaccatattttctttgcatttgagtaattgtcttgtacttagaaaaaaggcacctatgaatgaccagtgtttttggttgtcaaatgttgctcacaaacttaccccaaaagtttagtggcttaaaacaatcccacccccaactgttcttcaatctgagcagggctcagctgggccgttcttctgccagcctgcaggtggccactcaatgtggtcagcaggttgacggagagactgtgttggctggggttctctcttggcctgcagtcctgagtctctccttctctgtgtagtctctttcagtggcctgactggcagggtaactagacctctcacatgcagttcagagctctcaagagctcaaaagcagaaggggccaggccttctgaagacttaagtccagaattgttgcagcatcccttctactgccctctattgatgatgacgatgatgatgattttttctaaacagaagagagctggagtatgcctctacttattaaacaagtcacgagcccagcccagattcaagaaaagggtgtgaagtggaggtgcagttaattggggggccactagtctaacagatggtcacaaccagtgccatggaaaaccaaggatattagcaaaagtagaagttgctagtgaccttgggaagccaaagccgcttacagtagctgggacaagctgaaagtcagactaagaaataaggagaggtccttcaagaagcttcctgaatgatttctgctagccctgagcctatttctggaaccagcacttggggaaactgatcctgtgagaatggatgtgtttagggacacagggcttttgaaagcagcaccaccccactgggccacctctagacttgggaatgtgatgttttcttaatgccactggttttcagtcaggccacagtgagaaggaacagccctaacaggcctccagccaggttgaaagagctcatttttgttttagccaaccggtaagattttctaatgttctaccttaagtgccttctccaaagacatccctcttttgctcatatgttgaatcatcattcagtatatttcagttaaaatatcattggttgacttttgtaacggtaataaaatgctgtggcatcttggccgtgaaaaaaaaaaaagaagtgatcattacaatagatatttgtggacaatatcattggtgtcaaatgcagacaaggtttgcagatgaaaaaaaattagatgacacaccaaacctgaggccaaacagagtagtgctaggtcatttccttggcttccctaattccccaggagggaagagctgggtgctaatcaactaataccaataaactgctcttcctttgcccctaatttttgattgttctataggtgagcagaagagggtgagtgtgtttgagggtgagtgaaggtcaagtttccgtatctgcaacaaagcgtctgttgttcaaaatctccccttgcattctaagaagggtggaccctgaaggcgcacttttatttgctgaggtggatggtgagtgaggatacaaactggggaagttaagtatctactacattgcttaatttaatgaaagtggattgagasgttggggaaggtagttccggtagcagtgagttggctacagatgtggagaagagttttaagcaactgaagtgggagaggaaattaggggcaaaggaagagcagtttaaagcagagcatttctgatgtcttcctaggtagttaaaactcgctttttcatttccacatagacacttcaaccaaagtgacttctatttttggagtggtgtgtgtgtgtgtgtatgtgtttagataggacatattgaaactgcatccttgtctggggtaaatacctgaagttcgttgtctcctggcagggaaatcgaggatgtggacacacaggaagtgagtttaagagtggaggtttggccgggctcggtggctcacacctgtaatcccagcactttgggaggctgaggcaggcagaatacctgaggtcaggagtttgagaccagcctggccaacatggtgaaaccccgtctgtactaaaaatacaaaaattagccgggggtgatggcaggcgcctgtaatcccagctactcgggaggctgaggcaggagaatcgcttgaacccaagaggtgaaggttgcagtgagccaagattgtgccattgcactccagcctggggcacaagagcaagatttcgactcaaaaaaaaaaaaaaaaaaaaaaaggtggaggtttaataggtgaaaaaaagaaaagagaataactctctctcctgcagagagagagaggggttccaaagtgggtcttctggctttatggtcaaatgcatgaggttttatagatgagcttgaggaggtggtgtctgatttacatagggcccaaagattggttggaccaggtgtggcatttacatagtgtgcgaagaagctggtyaccccaccctaatcttttattatgcagatgggttttctacctggccagcgccatgttatctgttccttactgtacatgtggttgacaaaagggaagatggagctgctatgctgaacatgcctagcccccaggtagccttttcctattggtacagctgccagcatttacctatggaagattttcacttgcttatctgtgcttgcagcttgatttttcaggctgctttttgttagaaaagaaatgattttggggctgctttttattagaaggaaaccttaccaaggattctcttaccctcactaactaacttcctaaataatttctttctagctcctatatcaatatcaggtctgacytcaaggcacatttgggaggagacragggaagcccagtgaggccagtctcatttgaattacaagtgaataaattgaattttaagctgtatgcaattattattctataatctatcatgtatatttaatcatatgatagattatagaatcattatttatcttcgtttatctttatagaatacgtatttaatccccacccctctcagaggttattatacaaaagtaactaagttggaatatgtgctgacaattgcagtcaagattctgtggctagagagtagagggagtaatagaggtttttatagaatgattccagacaaactttcatttctgttgacatgagcttgacataatatatgcctacaagttatcattatttgtagattaataggacagtttataagcttcttatcaattttagtcaagatataattctttatccaactaatgagggattgttagcacataaataacattccaagagtgtgttttgtccatttcagtaagtcaaatacttattcaattggtgacaaargcaagatctaaattcacgagcactttatgtccttcctcagtggaaggtataacaggaagtaaattaaggttctatataatttattggatttttaaaagctttgtgcacttttcctaaaaatgccttgaggcattaacaataaaattaacttaagcatctgcatctacttatagccataatgatatattcaaatggaaatcaagagcatgcaaatcaagcagtatgctgttacccttagaatattgaagggtgcattaaagatatatagttattttaataagcaaggatgaaaacctttcatgtgtcctctttttatacattctgtacttctcttgatcgagcagcaaaacaaacaaacaaacaaacaaaaccaccaraaaaccaaaacccctcaaaactaatagaagctagggttcaggggctctacttgaatgtgaatatccaagtcttttcttctgtgtctgtgccctgccatagcccctcctccctcacactgtgctggggatggctctgcttcttgcacacaccagccatcctccatcatagagctatgctggtcacacacaccttacctgagtgcttgctgccagagagcagcatgcatcattgttctagaaagtggtctttctagtagattgctagagggccctttacctttatgatttatttataagacaaaattctaaaatgtaagaaggagtagaaatatacagcataactcatgtggggaataaaagaagctttgaaatttttttctaactgattttatcttgcattgtgatctcttttgtgctaatgaggtaaaaacttaaacttgacaattaaagatagtcaagtctctactggtgaaaacagcccctttagataaatattcaagctgttcaaagttcaaactccctctcagagctatttcttttcatacaagtgatagccctgccctccctctcttccttccctgggtggcaggtgggtgcaggaggagacttaagtgttgtcacagtggtgggtgggaactagaagcctggacgctggaatgggcacgagtccactgagtcctcatcaccaatgtgtcctgtcctgcttgtttgtggggagagaccttggtctcactgcctttatcgctgacatatctggtgcccggcatgaataatgcagtgggctctaaattgctggactcttcctgatgatgtcttccctctccacctctgctttcactgatgctctggatccctgaggtttggctgtgactctcatttagccccagcttgacagtcggccattctgctcacattctcagcatcacttctctatctgtgcttatctgccaggccaactcactatcctgcaacctcagctattccctctgggatagaggacactgaggggttacttgcatgtcacactgaggacctgcagaactcaaggtaccgtctcaggccttctctctgtctaagcctgtcatgagctatttcatttcaacatagtcactccaggttggcaagggtgatttgagcggttgcctttcagagttccagtggcatttggctttccctttaaacttgagtatatstattactcttcttgaccctgatctacaggtctttgtagtctctcctctccactgctgttttcctcttatttttccctgtgaagaaggagccatttatctatgggaaatataaagggaaaaaaagaaaaaggtgatcaattccctgtaatctttagtcaaacacacatctcagtcccagctctccagggtttgttgtgtgctgtgacatcagctcctttgatgactacaagtgcagatgcacagccagtggctgtgttagcaggtaattggtagagagaagagaagccacagagagcatgctaggaggatctgtcacaaaaattgtagtccataacttcagagtgtcagcaacaggaatgcaagacagttgccacctagaagtatggatttgttttcactaactctattcatctcctcagttgagaaatgaactagctcagtgacttttttgcttcttgtgtttaacccctcatggaaaaagtagaataggcaccaatgattttatttttactgtattcttacatagcaagtatgttagtttgctagggctgccataccaaaccccacagactggatggccagaacaacagacatttattttctcaaagctctggaggctggaagtccaagatcaaggtgggggtaggtttggtttcttccgaggcttctattcctggcttgcagaggaaccccttgttactgtgtgcatggccttctgtgggcactcatccctggtgtctgacttcttaggaagatacaagtcatattggattagggccccaccctaacagcctcgtttaaacttaatcacctctttagaaacctcatctccaaatatggttaccttctgaggtactgggagttgagattgcaacatatgaacttacagcgggaaaacaatttggcccataatagcaatggcattctaaggaatttcggtacttttaaattataaccattactgaaacaaatgttaataccatccctgcttttcagatcatgagacacaagaatagggaatggttacgtcagaggtttcaaagctcaggggagaaagtgagaacttaattcagttctcctagaatgaatgggatataggctcctgcattttaaattttcttcttttaattacacaaaagtactttaatatgtgattggtggggagatttcaaactatccrgaaaaatatagcatcatggtctttctgactttatattcagtcactctttctttgtcccagatattaatattttagtatctattctttctgataaaaaataatattcatacataaatataatgtgcaggtttgaaaattttaattttgtttttcgggtacggggtagtgctatatgtactgttgtttggctggctttgttccacttaacctgatgattgagagttctttctatgttagtataaggcaaagtttctcagccttggcacgactgacatttggggccaattttttgttgggagggtgctgtcctgtgcattgtaaggtgtttagcagcatgcctggcctccattcactagatgccagtagcactcatccctctgccagtcatgccaaccaaaaatgtctccagatactcattgccaaatgtccactggtgggcaaaactgctcccagttgaaaactactggtataaagagatttctctaatttttaaaaattgctgcatatccagtgcatggatcacaccatagtttactttacaatcttcctattaatggaaatttgagatatttccattttgttaccattaggagcaatcctgcattaaccatccttacatatgactctttgttatatgtactaaccaccttagattaaagtagattgccagaaattcagttgctgggtcaaggaaaaggcatattttatattttaatagatgctatgaaattatccttcaaaagcttcatacaatttggatttcctgaaatgagtgcccatttcttcacaaccttgccaacgttgaatgatatcaaatcttctaattttgttagtgtgactgaaaatgtgtatcttgttatatttctctaattactagaacttaagcatctgtgtacttgtatttctgtttttgtgccttgtttgtctttcttgccccaaccatttttatgagtggtttgatttgtaggaattcttcatatgtattctggctccaaatcttcctgttactgcatgcattgcaaatgtttttctcccaatctgttgcttattttctaactttgttaacacagccttttatgatcaggaatttaaatgtttacagttaagcatttgaaacttatttaagacagccttccaaacttctcttatataatgctttatagttttattcctcttgatggatttttagcatgcttcactttttatcatttagttctttcacccatctataatctattttttagactttttttaaacaggagttttaggttcacagcgaagttttccatttatcccctatcccgacatatgcatagcctccctttttatcaacattccccaccgaggtggtacatttgttgtcattgataaacctacactggcacaggatcaccctgagtccatagtttacattagggttcactcttgatgttgtacattctgtgggtttggataagtgtataatgtcatgtacccatcactgtagtatcacacagggcattttcactgcccccaaatcctctgtgctccacctattcatccctctccccatccccaatccctggcaatcactgatcttttcactgtcttcatagttttgccttttccagatgtgatatagttgaaatcacacagtgtgcagccttttcagattgctttctttcatctaataatatgcatttagctttcctccctgtattttcatgacttgatagttcatttctttttatcactgagtaatattccactgtctgcatgtactacattttatttatccattcactggcagcaggacatcttggttactctactaatcaccttagattaaaatagattgccagaaattcagttgctgggtcaaggaaaatgcatattttatattttaatagctgcttatgaaattatccttcaaaagcttcgtacaatttggatttcctgaaatgagtgctcatttcttcacaaccttgccaatgctgaaagttttgaaaattatatattgttactacaatcatccaggtgtagatttttgtgtcgacgtgttttcaactcctttgagtaactatgaaggtacatgactgattgctgaatcttatggtaagagtatgtttggttttrtaagaaactgccaaattcttttccaaagtggttgtaccatttcacacttccaccaacaatgaatgagagttcctgttgttccacatccttgccagcatttggtggtgttaatattctagattttggtcattttaatagatttgtagttgtatctcattgttttaatttgcattcctctgatgacatatgatgtggaacatatttttcatatgcttatttgccatctgtatatgctttttggtgaggtgaatgccaatgcctttggcctattttttaattggggtgtttattttcttattgttgagtattaagtgttctttggattttttggacaacagcactttattagatgtatcttttgcaaatattttctaccacactgtggcttttcttctaagtcttttgatattatattttgcagagcagaagtttttaattttaatgaagtacagctatcagttatttctttcattaatgatgactttggtgttcgacatagttaaaaagtcattgccatacctaaggtcatctagattttcttttatgttatcctctagaagtttttagttttgcactttacctagtaccatgatccattttaagttaattttcatgaagggtgtaagatctgcatctagatttattatttttttacaagggatgtccaatttttcctgtaccacttgttgaaaagactgtctttgctccattgcattgcctttgctcctctgtcaaagatcagttgactatatttatgtgggtctatttctgcgttctctattccctttaattggtctatttgtctattcttttactaataccacactgttttgattactgtagcttgatagtaagtcttgaagtcaggtagtgtcagttctccaacttcgttcttttccttcgatattgtgttggctcttccaggtcttttacctctccatataaatcctagaatcagtttgttgttatctacaaaataacttggtgggattttgtttgggattgtgttgaatctatagatcaagttgggaaaaactgatataatgacaatattgagtctttctagccacgaatatggactatctcttcatttatttagttcttctttattttgttcatcagagttttgtagtttttcttatgtagctctggttttcttagattttcttagatttagaactaagtattttacttatttgggtggtaatgtaaataatattgtgattttaatttcaactccaattgtttatgtctggtatatatgaaagtgattgacttttgtatcttaaccttgtatctgcaatcttgctataatcacttattagttccaaagtttttgtggattattttggattttctacataaagaatcatattatctgataacaaagatggttttatttcttccatctccatatgtataccttttgtttccttttcatgacttattgtattaactagaacttctagtacaatgttgaaaaggaatgatgagaagggacatccttgtcttggtcctgatcttagtgggaaagcttcgagtttttcaccattaagtatgatgtcatgcgtaggttgcttgtagattttttaaatcaagtagtggaagttccccttcgttcttagtttactggcatgttttagttatgaatggatgttggattttgtcaaatgctttttctgtatctcttgataaaatcatgtgatttttgttttttaggctactgatgtgatagattacattaattgattttmgagttttgaatctgccttgcataccttttatattcactgcrgattaattaaactttgtactcaggaaggagaacaatgaaaaaggtagaaagggtctgaaagaatatagccttgcatacctgatataaatccctataatttattttttataaatggtttcatataggaatttttttccacttctaactcaagcatttgtataaacacatttgaagctgtttgaccaatcttcatataggttgctgtgtctaacacaaatatgatgataaaaaacaaatacaatttgcatttctattcatattaagattatttatagatctcctatctctcctttacatagagaatttgtggcacttaggacaggtgattttctaactgctgccttcattattcctactggctgcctggctaaaagtggatggaatagagctctacctgagtaaggaagagaagagcagaattctgattatttgtagctagtggttgttttgcagaaagcaggatcatcatccgcatgaggtctttgaatttctttttcattttgctgttgccaatcctctttatttataccatccaagacctaaattttctttttcaatcccgttgttggttagtctggctgggtccaaacaagatcaccacatattgaaggacctgttgttcttggattgcaaaaccatgaggatgaccaggtcaggagggtgtggtgcaggagggtctaggaggcaaagatctgaaaggggctgctgtaaaggtagcagcccagagcctgaagctttagcagagatggaacaaatctgtgcattccctacacttcatcaccaattccacccccacactggatgagttcaaacccttttatattcactgcagattaattaaactttgtactcaggaaagagaacaatgaaagaagtagaaagggtctgaaagaatatagcacaagtgatattgtatatgatttagaacaaaataaaaatgtaagtgggagatgatgtctgtttcctcctctcygacctcatctcctaccagcctgtccttccactctcaccaaactctggccatgcctcccccttgctgctccatgaacacaccaagaggctgctgttgtggatcttgccactttgatcagagcactctttccccaatctccccagcgcattagctccctttcttcagtctaggcacacaggaaacctgttaatgagaccttctctgggcactgcctgtacaataacatgcctcttcagtcacttggcccacgtttatctttctctgtagcacttaataccttctgctgtgctatatatttcacgtatgcacattgattactgtctgcttctcttactgaaatgcaawttccaagagggagtttcttgtttctttggttgataccatgtctccagtgcctacaacagtacctggtactcaatacatatttgtgctgaatgaataaatatattcagattattcagctaagacatggggaagacgaggtgtgaagtgctatcatctrattcctgttttttttccttagggaccccatttaaaacaaatataatattccmggatgagggaaatatacttctaatgtagtttttgtttgtatcatttaccgtacatctaagttgtggtaacttaaagggcatattaaakgtgctgaaataaatgctgttgtcagtaactttggagatttgtgagataaggaagcagaaactaagggaagcagtgttactaagatakatttcccttctgcctgtggctagcttgcacctctctatgaggtcatccatgcagatctttctatttcgagcttgtttcagtaatgtgcacttttaggtagagagttcttccttttcggataataggatcaataaaagattagtgggatgttccttgaaaactaacaagtcagccaacagaggacacacatatgtttgggtacagataatactttttcttccatagtacccatttcccagtaattgtgaacattttctctttaccttatgatattattatatagaaaatagaatcaactgtatgtagttttaataagagcactgtaatctgcagagggtcagataaaacctgtgaatcccactttcctgtcttgtatattttcatagaatgtttgaatctttttgcaatgcaaaatttaaaaaatgaaatgcctggagagtattgccctaaaattatatccattttcagatcctatctcaaattatatgttctccataagatcatcctgagctcttcaacctctttggagcttcctatttcaggacaaagaactactttggactttcctgaaaagacttgctggctttgtattctaataarctatatgtacatgtcccatttgctccatgagattgtactttaaaaatttatagatgaacttgggataggccttttaaaattgaaaaacaaagttgcaaatgtcagcttcataataagataaaatggaattttaactttgattatatttaaggcaccccaaaaacttatttggaataaaaatatattttaatatttatcaaactatattattaaatgctcagaagtgagagaatgccctctaacatcaaagggttctggtgaaaatacattaaaataaatawccggaatacttggggaattaacaaaaagagaaataatgagcaaaataaaattcttgattccaatacttaagccttgtgttgtttctaagagtttctcctgtagaattatggcacagaaggaaggcaaacatatacagagagacaatagaaattttcctttgagtgaacaatgcaattactaaaattgctaagctgaatatttatgctgtataaaaagccaatgtttattgcttttgtatacactatcaacatgactaccaagactgtcccatgccacagtaccttgtcttattaaatgatatgaaggktgaagaaaggatttacttgtattatttaacaaatactctctgatattgagtagttgacaattttttcttgaaattgtttgcctatttttgaatacttcagtgtttgccaaaatattggttataaaagagtcacctgctctaagccttcttttgcagggatagcactcaggaataggttaactgatgcttttttgaaaatgttattctaagtgggatttgtaatatgtggttggctcttcagtctaagctaaatcttgtttaatggcttcattggcctaatgagatactactactagagacttattgagagcccaccaattcagtaagaatctttagagataatagcattgctgcacagtggatccaaaagacaccactcatttgtcaatgaccatgaaatgaagtggaaatggcttccagtgaatgtcagatgtaagccagggctggagatgatattttcagtcaacagtgcctataaaactgtcagaaaaataaaagttcctttggttaaaaataaagaaaaaccttttgaaaatatttctaggcaagccaaacatatctgacttatgtggtcggcattttcaaggccattttgttgttgttgctttttccctttctctataagcagaaactagttatctgaacaggcagtagagcacaagtatttgtttccgaaaaagttacctgaaagaatagcttaggaactgacgtgagttctctctttctctttcctatctgaatatttatacagttgctttttcctctgccaggcacacggtgttggaaatcagcctacgacmaagggtaatatcaggattgtatgcttctttctgcatgtcgtgcttttatagaccattggttctggaagtaatcactgacaattactactgttagctacatggtatgacagagacccttagactatatccttccatggcattttcattacaaatcctactaaaatgtgattcattgtctcaagtattccatacattacccagaatcactgtttaaggctggtattacaaaccactccatactattactttttgayctatcaaaaaaaaacaaggttctattgtccaaaagctgtgtatatgtaatagcaaartaatatctattgagtctttataagaaactaaacttttttaatgtaagactacattgaatggaggctccatctccatgctattcatttattttattattgttgacattaaccagcagagctacgtcctctaaaggcttttccctaacccttatagacattctaagcatgtctgtagaatgtaagttgtttcagaataagaactacatcttttgaaggtgtgcatgagtttgtaatatttaatatccatggatattgtattagtgatacaatacatttaatacaaaacattaagtgataaatagaatgaagatgaccctaggctttgtttaattctcatttattgttgagaatcataacaatactagtgttttccgtgttgaatttcccactacctcatagataatttcataagctgtctcagaattgatcactttgtcctagcctaggtaagttcctgcatatgtacaatgggccaccaggctcagtttctttagacaagacagaaatcaggagggacctacctagaactttccaaagtgctgaatttcttccagatgctctttgggagaccaaagctctcaggctgtaaaaatgagtggacctgtggtgtcttccggtttccactcatgttagttccttctttggtaggtgatgaggagtctggctgttgaccaaaaacctatgtgtgatttttttttcaaagttgaccctaggaaattacaaaggcttcacctagcaggcctcactggaaaagctgccctcttcactccagacttggggcacagccagtgcattgcattctctgaaggaagttgcagtcaaggtctcatcccctctggcaggctatgctcttagtcttagctgcattggtagcctaggtgcctctatttggagacctccttactgagaaagtttggcagaaactttcctcaggtgcctctgcygagacggccttatctatgggacggggaaaccttgaagacactttttatagtgtcttcactagaagaaaagtagtcagtacttttccattcctgacccttccctttctccctcctccagacctttggttccataaaacagcaagagtcttttgtttgagactcccttggcagtgatgattcctcacatctgtgtcccatgctgctccatctgaccattccccactgctgatccatggcaaaaaaaacgaacggcaatggagctggcactttctcctatttggcctctttcttatattatggcagtaactgatggaaggtttgactgctactttcattttgtattattgtcttaattgacagctacatcacctggcaactcagttcaactcagctcagctcttgacagaagatattgctttcatgtagagtaatctcacctcattctaattttacattcaaattcaaacaagaaatctaatcattgaaccacaacttagagtagtatacagagagggggaaattcactgttttggtttttttgtttgtttgtttttcagccaaagtctcactctgctccccaggctggagtgcagtggcatgatcatagctcactgcagccttgaactcctaggctcaagcaattctcctgcctctgtctcctgagtagctgggactacaagtgtgctaccacctgtatttttaaaaaattttttgtgtaggggtcttactatgttgttcaggctgggaatcaactgttgaccattacatggacaactcattttatagatggaggcaatactaattatggccggtaaaactcacacctgagctgtcttccttcctctgtctaccatgccctgctttaccttccatgtggatagaaattttaaccaataatatatccaattaaacaataatcaacatttattgaatgaatactttgtgtcacatactgtattgggggatatagtgataaaatacctcacaagttctgtataaaatattggagcaaaatataaatgggtagtgctaaaagcaatgtgttatattttcagttctttacaatagcagggtgcttactggtggttgggtgatatggagacaagtagggggaagactcttggtggctggcaaaatttaagtagcatcaggattctggccaagtaggatggagctcagggaatggtacaaataccactatgtcattgaaatgttggataggtaacagattagtaatgtgaatggaaacacattaggtaggtgtcagagaagacagggaaggttattgtgatgcagagaactatgggtatattaataaatggttagccaggctaatcccataaacagactctaaayattaaagcttccacttccaacctcatatatatatatatataatcaaatgttgataggcagtgggattggtgacttatctacttgccctggagaggactggtttatgaactggaccaggatgtccttgttgtacaaactagtaagtaggaaagaagtttgagcagaaactgagagatcatttatgactggctaatctgttgaaagggtatagaccttgtatatctttaaatacaaggatttctgctttctgttttgtggtagaaagttgcaaaagactccaactatataaatgacagcaactcagtacactttaacagcaaagagctaaagaaacacagtgaattaaattctagaaagggataggcccttcctagcagagaaggacttatggctgctctcatcccaggggaaaaggtcagtagagaaggcaactatttacctcaaactgggtaagaatagaccagatgaacttttaataaacatttaatcatgtctgtgggttggtttgttgtgttataccccaagaagcctcagtcagagatcaaggccacacctgccctccaatttttgctcactgggactatagaagcatcattgttagggctgggggcaggtctggaatgtggagagaaaccccgctggcatacagcgggtttactgactgcaaggcagtgggctgctgatggctaggggaaggacagtagggtggagagaggtcttcatgctacctaaatcctgatgctacctaaattttgccagccaccaatgcttccccctacttgtctccatatcacccaaccactagtcagaagagcaaagggaactccacagacatcttaaaaactagcggataggcgataaagcatggagtgacctctggagcattgctggtgttcaaataacaatttctgattgcaccatggaaatatttgaaggcattggtgactagaatttaagtaaagccacaacaaatccagacccagctcaagtacacattagacctactcagcctggaactggcacagcatcatttctgttgcattctgttggtcaagccaattaacaaggtaagcgccaagtcaagagtaagagaaataatcttcatctcctgatgtgaggagtgagtagcatttgcacacggagaggggaggcattgttgggacctctatttgtagatgagttaygatattaagcagtacatttaaaaataacccattgttctaggaataaaccacagttttaagaataggccaaaagaagttagaaaatattttaaactaaatgaatatgcaacctatcaaaatttgtggaatgcagccaacacagttcttagaggaaaatttgtaatgttaaatgcttatattagaaaagacaaaaggtttaaaaacagtattctaagtgtccaatttatgaaggtagaaaaacaagttaaatccaaagtaagaacaaaaaagtaattaataaagagtagaaatcaatgaattacaaaatggacaatcaataaagtcaacaaagcaacaaagccaaaagctagttctttgaaaagattaaaaaattgataaaacsctagcaagacagctcaaagacaaaagaggggaaaacatcccacaaatgaataataccagaaataaaaaatgagatatcacaaaaaagataataactttatgctggtaaatttggccatttagataaaatgaataaattatttgatagacacatattaccatagctgatacaagaagaaggagaatatttgaataaacacaaatcaatgaaagaaactgaatttgtcatcaatcacaagaaaacttcaggagcatttatttttacawtttttttctctaaaagaaaggatgagagaacactctaacttgtattttgagcatgtctctgataccaaacctgaaaaggacatttcagggtgagaaaaatagagaaatatttctcatgaacatagacacagaaaactttggtaaaatattaacaaatacattccaacagtatataagaaagtgagaaataaaaatgttaccaagcccccaccgactgaacagactgcttcttgaccaaggggaccycagagaaaccttaaaaactgggtttccagccatgacaggatgggaggtcagatatgccttccttattaaccttcaaccaggattctttcctaaagagtaagcagagaccagctttagaaaacaagacatggatgcctcattcctttatggcctttagccagtcatctgagggcwtgaccagacttcctcgcaatgcattccttcctaaaaactgaccaccatctccaggccggttttggctgacttgtgcagaggatgtgcggtaagcatgtacatgttctctgcttcaccttttgacagcagagggctgacaactccaccctcagatcatgctaacactgccattttttttgaacatgtgacctatgaagaggcatgtgcatggtttcttctttcgtaaatatttatgactcctcttgtagcttattaaatatgtatatttggccaccctgctcagcgtgaattcctatttcctttgccccttccctgaagtgcttgttcttggcttttactggagactatgcttcccagccagcaggatgggcagcctgcagattatgggtctttatgagaaataaagctctcctttccaaatttatgaaccttgtgattcttcaattggcaaaagtataataaatatattacattaaaacatgccrtgggcactcattaaaccaaggtgaatattattgtgttaatgtaaactagtcattttttaaaagaatttgaggcagggtctcactttgtcacctaggctggagtgcagtggtatgatcatggctcattgcagcctcaaccttcccaggttcaggtgatcctcccaccttagcctcctgagtagctgggactacaggcatgggccaccacaccagactaattttttgtaccttttgtagagacagggttttgccatgttgtccaggctggtctcgatctcctgggctcaagtaatccacctgccttggcctcccaaagtgctaggattacaggcatgagccaccacacccagcttaatgtaaactaatctcaaaatgattatatagttaaaaaattgatgatggaggataacagatatgcttttcagttatcacagttacaggataggttgttaggtgtgactttaacatactcgaatcattaattctgttaggcatgtttattaagtttggctgttgccttcaggctgttgaatgtttaataattcgaagtacagttactgatagaatttctatctatatctgtgtatcgatctatgtacgtatgcatctatctacctatctaatctgtctatatggtcagcattaattcattttctttagtcatattcttgttatttatctttctacactagtgcttcctaacatgtgttgatcacaaattctacaggctgttaatagtttaagtgaaaccaaacaggcgtctttaaagccagaaagtgcaaagcgttaatggccctgatgcatgtaataatcccagaggtggcctacttgggagcctgcctgtgactgtcaatgcattccccaaactcaccactgtgatttcagacaccttaaagaataatgtggatcttaatcattggtattcttgaagagataaacatagtttatgtagtaaattacaagccagaacatttctgtatccatcattgaagcagctactcaaaaaataccttctctttgccccataatcttcctttttccttcctccttttcccacttatctgtcagtctatccatcattctgtgttcatctatctctccacccattaattaatccattcgttctcattctttttctactcctttgtgtttttactccacacagttctttttttcttctttttctttatttgctttatatgtatatatattctttatttgctttatatatatattctttattttatatatatatatawgtatatattctgttctcaatatctttgacagcagccttggaattttaacacagtctatgctgtgttttctttttgcccttccttttccctttcttttctctgcctctccttgcctctcttctctctttttgcctcttctttctgtagaaataagaagcactttgaagtcctggtgagaaaaaatttccatctaattatatttcagttttctaagagaggtgtatatatgttatttaatgtgtactgtttcctaagcttatttaaccacataattttttgaggggcatttttgaaactaattttatattgaaaaattagtttaataatttgaagtacagttactgatagaatttctaactatatctgtgtatcgatctatgtacgtatgcatctatctacctacctaatctgtctatatggtcagcattaatccattttctttaatcatattcttgttatttatctttctacactagtgcttcctaacatgtgttgatcacaaattctacaggctgttaatagtttaagtgaaaccaaacaggcttctttaaagccagaagttgcaaagcgttaatggccctgatggctttaacccaatggataccctgctgtattttaataaattatatctttctttttttgcttttaaaataataaaaggaaaataaatacttactgtaaatgaaaaatatacagaagtgtgtaaagtaaaaaagttaaaattctctgtacatttcaactaatggtatgctccatggagggaggggccaggctctgtcaggttcaccactgtgtcatcgtgcccagcacagtgccagatactgaggaaaccctaaataaatacatgttgaatcttccaaactgacacagacatatatgatgcattggttatttatcaggagctaaaatgtatttcaactattttgcatttatatgtcwtatagttcttagtgactcacaatgaactcatagttaatccagttactctatataatgtgaaagtccttgtcgaatagagcaaatgcaatccaggctttagagtgaatcgttcaacaatttaggaatgcattctcagaagtaatgagctacagggaatctccctacccaaccttcatttagaaacccagggttgtattatatgcagcagtctctagggtcacctgctatctactgaatgccaatcacattttctctgcatcaccactggcaatggtagctatactctcattcaggaacaatattagaaacctccaaatcacagtctcaagtaactgctcttttgtctataagggaaatcagtgttggcagatgtcttataatttacaaccatgttaccccacatattatctatgcaaatcataatttaaacttattttgataaccagttctttaaacttgaaaacagattcatgccagttgtaaaatggttaaacagcatggaagataatacagtatacataagtctagtgacctcgacccacctagcctgccctttccagagataaatgctctgataatttcctgtgtttccttccagacatttttttaatcaccaattttatcttccaagattgttttttgggagaaagttaaaggcatatagagaaaacacataagaagagatcattaagaagaaaagaaggaagaaaaaaggaaagaaaaataaaaagagcttattagattctatatactaaaacaggagatagagattaaaagaaacacacatgcacacccaccttttgtacctcaaacctcttgctttccatgtccttcatggggtgctgagagtcctagaaaattttttttgtgaataaaaactcatgcaatggaaggtgtcttggctgttgtcctagaggttttgcatttgatcactcctcctaagaaggagtcattttaagaaaacttcctttctctattcataactacttgtgtcatattataatcaatcaaagatgttctcaatgtgacaatgacaggtgcggtgatacaggtttggaacygggcaagtttatatgagctgtctttaaaccagcaattttgtcttcccagggaacattaaggagcaattttgtcttcccaggaaacattaggcaaagtctgtaaacattttggattgccatggctgggggtagttgagcattgctggcatctagtggatggaggccaaggatgctgctaaacatccttcaaagcacaggacagccccctacaagaaagaattatttgattcaaaatgcaacagtgctaaagttaaggaactctactttatcttattttatttttttgagacagagcctcgctttgttgcccaggctggagcgcaggggcatgatattggctcactgaagcctctgactcctgggttcaagcaattcttctgcctcagcctcccaagtagctgggattacaggtgtgcatcaccatgcctggctacgttttgtatttttagtagagattgggtttcaccatgatggccaggctggtcttgaactcttgacctcaggtgatctgcctgtattggcctcccaaagtgctgaggttacaggcatgagcccccacacccggccaggaactctactttaaatgaactcttttgcaacttttttcttttagggacagtgattttcattagagaaacaactcaaaataagcatcaatatcaacagcaataaaatcttagacagttttccactgggtttaaagtttgggmtcttgaacctcagaacataatggatgagtttggtgtcctactgaatcatccagaaaaataatttttcacagcattatcaatccttkgccttttccctttttawcctttctgattatattgcctatggaaaaagccaatctgtttcagtcaggtgaaacttgaacaacagggaataatagcaaataactatatatttgtttggaaaatagtaaaaaatagacaataagtcccatgttcattgtcttttgccaagttttgttaccagctcctttagaatctttttttttttttaattaaaagtggttacataaatccttattagggtgaagcctgataactgtgttctggtgggataattgtatttaatctgctcatttctgaatgccagaacagattaaagcatatgaaaaattaaataatgtgagattgtaatgactctgggttagaaagattcttgaaccgtagtaaatcctatcattgcttcatttcagtggagtttatggcctagagaaatatgttgaatattgaacgttaaagttgtcttagtgaagaagggaattagaccattggaactgcaataaaatggtttagagggtatggaactcactcctttaagttgttgacaagaaagtaaaggctctaagctggtaagtggctggccctgggtcaaggttagtggcactcctggggctagagttcagggcccctcatctgagtccagtgttcttctggcactgtttctatgctgcagctcataattatctctatgtggccagggctacccagagtaaaatttaccaaagacagaccataatgccttacatgtattcatcacttcagaatattccaactgctttcacacatattctctcatataaaaatcaaccttattacctaaataggacaagaatcttgtctcaattgatcagagaaaatggaaatgcagacatatgtagtcattcattttagttaaataactattaataatagacacagatgtttcagcccaggactctcctcatcmtttaattgcaggtttattacaggcacaaactggtatacaattagcctctctttataggtggcttaccatgtgcctggtaccgtgctaagggcatgaattagcccatttattccttacaatgactctaataggttgatatgatttttatctcacttgcttgataaagaaagtgaggtgtagtgaggttcagtatcattgatttagcttaagtctgtattaatgatagctttagaccaagatctgtttcatgccaatatccatattttaatcattatactatactaccagcattattcaatatggtgtttctatggctattttggtaactaatacaatgattgaaatagccactgcacatccaattttatgtattgatgttctgattttcacaaaaatcttttaccctttttagcccttakttatagccgatgctggggagaatggaggccacaggttaacataattttctttttcttccttctacatttatccagtaatttctatctgatttccctccctcagtattcctacacttacccattcactctaacctacccaatgcagcaggggtaggctttttaggaaaggtatctgattgtgtcattacttagaagcctttaatggatcactcataacttcagacacaaggtactgcatgatccactccctgctttattgcaattttatgtcttgctagttcacttcagactctgttccagccaccstggcagtttagtatctcctcaagctcggtgtgtgtgcattttcatattctttgaattacctctccacactgccccctgcctccttcctctgccccagtgtagccctaattcttttgttctttaaagctccgtttaagaatgttcatgtcctttgtagagacatggatgaagatggaaaccatcattctcagcaaactatcgcaaggagaaaaaaccaaacaccgcatgttctcactcataggtgggaattgaacaatgagaacacctggacacaggaaggggaacatcacacaccggggcctgttgtggggtgtggggagtggggaggggtagcattaggagatatacctaatgtaaatgacgaggtaatgggtgcagcactccaacatggcacatgtatacatatgtaacaaacctgcacgttgtgcacatgtaccctagaacttaaagtatataaaaaaaaagaatattgcttctgagctccccaaacacccaraatatagtttgatcatggctccatcatgtagatgataattgactttcctttccaactacactatgagctttcaatagaagggaccatttctaggcctggcatggtagctgacacctgtagacccagactgaggctgaggcaggaggattgcttaagaccaggagtttgagaccagcctgggyaacatagcaagactctgtagaaaaataaaacactggccagatgtggtggtggtggtgcgctgttagtcctggctacttggaaggccaaggtaggaggatcacttgagctgagtttgatgttgcagcgagctatgattgaaccactgcactctagcctgggtgacagagtaaggccctgtctctaaaaaaataaaataaaataagaagggaccatttcttagtgtctttatttctccaatgcttagctcagttcctggcctgtaatactaagctaataaagttgaatgagcatggtagtgtgaaaagaagttgaggattgaatagatatggaaarcataggaaagagaagcatgaaagatagtttcatgaaagaaagaaagacgtctcctttgggtagctggaaagatttttatgttattaattgaaacaggatatttaagataatgatacgaatctgctggggaaaagggaagttggtcaatttggtctgctcatgtaatatgtacaatayaataaggtgaccatagaatagtaatctccaacctgctttaaacattatgtgtctagtagaatagttagaaatttaggtttcatggaccaaaacaatttaaagaggctctgttagcctttgtaattgtaaaataaatagatcctaagttcctcttcaatgcatgtatttatgaaaatgaaaggaaagaatgaggctgacttcctcactcagactccaggtttccctccattactttttgacattgctcagggagaagcagaaattgaccctaaactttacaagcagctgatctgcagcaagcgagtgaactttataagcttagctgaaatgggatgctatgtacaaatggaatggtttttttggtagctaagtggctcttcataacattgtataaatatcattcactgaattagcagagtaggagtagttggccttaagatatttatgtctttggttgaatatgcaatcatattacttaagcagaaatttgtttatgtatgtagacctttgttcttggactctgggctgtggggacccagtctcggttggaaacaaagaacagagaacagtcctgtgaagaataagctggctttgtgagaattatacagaaaaaacagaagtgtagctagtacatggctaacttggtctttctagaatggacccatctggtttcttcactagtattttatctcctacatactttgcaatctttttgcaaaatttagccacaataatttctaattctacaagattttgaatgtatagagagcctctctgattctctggcagaggggctagtgagtaaagcttagaattgtcttaacagagaacttactgtgaatgcagtttcaatatttaaaaggtgagctcaccggtgggcggtaggactatgtcatggcaagtgctggatagcatcacaatttttgccttcccaggcctttctcagggcatgtcagtgaacaactgaatatgagcatcctgaaacaaggaatgcatctgctatatgctgaattgtaatgcttcccgaacactcaaatttacattttgaagttctaaccctcaaatttgaccatatttggagataggtcttcacagggttaatgaggccattagggagggccctaatccaatatggactggtgtccttgtaagaaaaggaaatttgatgcagacacacatagagggaagatatggaaagacataagaagaagatagccatctagaagcygaggagggaggcctccgtcagatcctttccccatgaccctccttcctcagaaggaaccacccctgctggcaccttccgcttggacttccagcctctagaaatgtgaggaaataaatttttgttgtttaagccatccagtctgtggcactttgttatgggagcattagcaaactaacatggcaccttcttgcctttgtaacrtcaggccttatttcaggcacagcctgggatatagaaagtttttaataaccrtttttgaaccaaaggaatagaaaagagttagcacaacttgtgggactatgcataatccacaaactattatccattaaaaaaattcaccaatcagccaagagttgccacagatttatgtgagagcttgtagtgggtgctgtgtatccactgtactcacagatgtaggtgtcagccctggccttaaagaggcttcacctgggtttgctcctcctagaaaagtacagacttaaggagtggtcccacagtagccctgtccacacaggtggtcctcctgccttgtgcctcatcttgtctgtactgatagtggtgcttttttttttttktttttttgaggcagaggaggaagggcgtcaatagtttaaagagcctcctaaacacatacattcaagtgttcctgccagtaggtgggggagtaggctggcataatcagaggttgttttttgccctgggctccaggctaatgatcagatgatcattagggtccactggaatttargcattctccatttctcagtataattttagtgttctttacttagctttgtagcagaagaggatatttaccctgtaggtagactattaactgaacttactgtggagttgaatgaaacataaaatacacaaggctgagtgtaagttagaccaaaaatcttttctcrtattaagagctggcagatattctctagccatccaaggattcttcaacatttccgtcttgctttctaggaatgagaattatccttcacaacattctctatttagcatacatgttgtctctttgtaggtgccatttcattttgttcttacaacaactctaggcagtgaatacaattgtcatagccattttacagacgaggagattgaggaacacagaagttaagatcatttgaagaagaaagctaaggttcagggagtttggcctttttctggagcctgtggcccttgttgtgcctcattatgtccctgtttccattgatgttcttttgatccctgtcwcctagtcttttcttttggatggagtttgtgcaatgggtagaggttgggaggacttgcaacttcccgatggcaatttcctaactttcctgcttcttttcttatgttattctttgtgactctgtgattcctctcctaagcatcttcactgaaggaagctgtctgctccatgtcttgctactgtatgtcttaatactactgcttctccctcctctccattctagcccttcatttttagattttagccttgtctgcttcatcaccatccactttttttcttgtatcctttgtgttttctttctttgcattgcctgatactacactctgtttatctctggacttgtctgccctctaacctattatttggctcacctaagaggcctggacattggataattggtttcgtgtagtcttgtggtcccatttagttcatttgttactttataggtgaaatggaagcatgtcttttgtgcaggaagcttccctctttaaatggaaaaagacctacctgagagatgacctgccatgaaaatgatattctccacacacaaaacaaactttttatgatgttctcacattttcttattttcaagagaccctatgactgattgatatcaaatcacacagaagcttaattccatatgcttctagacttgaattttccagtatgtgttccaaggagccttagttctgtaagaatctcctttactattaacatcatggtaacatcttccttttgccagacacaggatattggaggtggaaggagccacctgtgtactccttgttgcgtcatctgtgcccctcactcctgatcactttccccatctctccaccacaaagtgcccaagagacccactgaaggaggctacaatagcactcaatcatcactttctccaggatgtcattgagccctgcatcctcactttcctcagttactgcaaaaaaaatccaagcctcccactcatggcccatccctaagacccttattctcactttcttaatatagctgtgcacaatttctgatgagttccagtctccctcccttcccggcaattctactgtatattctggaattcacagtgtgtgtacaaatsagaagaagctagattttactatagtagcaaatcaagcacacacacacatacacacagcaccytaaaacactactggttccttataaaacaaaggtttatttttcactttatattccacattggttggcagggagtcggtactccagaatcacccagagataaagctgacaagggcttcacaatcttctgtcaaaaacatctggaaatgaagccttcttggtggcctcaacagggtaagagtgaaatgggagacttgctcatgggtttgtcactgtctcagcctagaagtgacacatgtcatttcttacatttctgtgccagaaatattcagatgaccttgcytaagaacaagggggctgagaaatcctctcttccccatggctaaaagagtaggggaatgatattagtagtatctgtctttgagattgaaaaattccccatcttcaatctctgctcataaatttcacttcgacttcttgttctaagtaaaattggcttttcctaaggtcactgcttcccctgtagctctcaaatgatggctctgtttccccctgcatcccaggtgcttctgggctcttgaaggtatgatagtacatcctttgtttctcacttctcccagaataaggttttctctggctttcttcacttttccccaacatctcctcatttcccttaaagctcataccatctgactgcaccatcggatccccttcctgtcacagacatctgtcatccttccttccctctgcagccacgtgttaatggaacattttagcactcagtatattttgatttactgcatttttctccttcatgtctctgtcatttgtcttggtgatttcaatagccatgagtacaattcttctcataccttgttcttgacctcttcccttcaaaatgttttgccttttacttacctctgacacctattctcttgatcatcctctagacctttacctctgaaacctcaattaatagcatctcacttactagccatcactttttgtttttccctcttaaccccattgttatgggctgaattgtgtctttcccaaatttatatggttaagtcctaagccccggtacttcagaatgtgaccatatttggaaatagggtttttaaaaaggtacttaagctgaaatgagggcattagagtgagccctaatccaagtgactgttgttcttataagaagaagaaattaaggcacagaggggagatcatgtgaagatactggaagaagatggcagatatgatttggctgtgtccccagccaaatctcatcttgaattgtagctcccataattcccacmtgttgttggagggacctggtgggagataattgaatcatggggacagtttcccccatactgttcttgtggtagtgaataagtctcacaagatttggtggttttctaaggggtttcaccttttgtttggttctcattctctttcttgcctgccaccatttaaggcatgcccttcaccttctgccatgattgtgaggcctccccatccatgtggaactgtgagtccattatacctctttttctttataaattacccagtcttgggtatgtctttatcagcagtgtgacaacagactgacacaatagctatttacaagccaaggagaatgacttaggaccaaccctgctggcaccttgatcttgggcttctagacttcagaataaatttctgttgtctaagccacccaatctctgatcctttgttatagcagccctagcaaactagtacagtacactcctctaatatccttgtgttcttacctccccttctcagctcacatttcgtggtcaaaagaataatagtggttttctacacttcttcttttttttttttttctggtcccttatctctctgctatatgttataactcttgtctggcaaaacttccaccataagtatatctaactctcctcttagataaagcctatagccgagcagctaagcatggctaaaagaaaacaacccccatgcagtccatgccgggccatctcattttcaacatttctctaatccttccctctcctgttccctgagaaggctggtttagaccatcttcttggtcctctgacttccaatcccctctaaattcttagctgatgatttgcttctttttctaggccaaaatagaaggaatcaaaaaagagtgcatgattctgcctccaccaaatctactaacttcccgccttctgaactctcatactctgacatcttgtctgtaaagtgaatgaatcattcacatgtccagctaaggcaagctgtttgcttgtgctctggattgcctactgaaggaaactgctcctgcaattgtgtccccgacctcctgcatcaatgccctcctgctttctggagaatcatttctatcagcatactcgtatgcctcaatacttcataagaataggctttttcggtggtggttgtttgaagctataataccagctcccaatcttaatgtatacagtaatgatttatttcttgctcatacaatatcaaatgtgtgccagatgagtctccagggccactctccttcgtgagagtgatgtggggattctggttcctgcaatgtgtgaggccactgcctcgacacatggctccccgtgtccctatggcagaggaaaagagaggggaagatggcacacacatagtaggggaaagagaaaaacattaagataatttttttttcatcctgggacaagctgctttagagataaataattaaaaatccatgatattttaattttaatcgtgctatccactatgtgagaggccatgaaccactgacaaataaaacgaggatgatgatctcctttgtatgatccagatgtagtagttgcacagttttcttccatttcatttgtgtgtatgtgtgtatgcatgcgtgtgtgtgtgtatgtcttctctatagaattcatagcagtacactcctcttaactttgggagataaagggtaatttcattcaataagtctgcaatgggagagaggaatctttcctctgggttaagttttttttcttactctacagaatatgaaataagatgatctgaattcataaatgaaaggaaactatttgctgtccattcatgtcagggtgagagcaagtgaacttgtttatgcctgtgcatatctgcttggggttttctgtaagcattcgtattgctccaaactaatctttcattaatgtgtgaatgaagtgggagagagcgggtgactagagggatgacagctgcaacaagaaagagcatctagtggtccagtcagaaggcatgtgctaatctttggttttaagatttcagtggcatccgctttgggagaccgacatgggcagatcacctgagctcgggagttcaagatcagcctgggcaacatggtgaaacctcacctctaccaaaaataccaaaaattagctgaggttggtggcgtgtgcctgtcctcccagctactcagtaggctgaggtaggaggatgactcgagcctgggaggtggaggttgcagtgagctaagatcatgccacagcactccaacctgggtgacagagtgagaccccatcttaaaaagcaaacaaaaaacaaaactaaactaaacaaaacagaaagaatccagcagcatctttgtatttacaaatatgtccttcaaaactgatagaactaatgaagaagaatatgatatatagttgctttttgttacataacaaaccatgtaaaaattttagtagcttaaaacgtgagtttattgagctcatgattcggtgggtcagtggtgtttctggtttcactagtctgcagtcagctgcctattatctaggcagttctgcttctgagggttggctggctgtaggctggggtgaagatggagatgcctgggccacgtctctcatcttccttcaagacagcccaggtatgttcacatggaaactggtcaggatcctgagaaaaagagtggaagaatgcaaggttcttggacccagagtatggtactggtacacttgtagctctgccacagtcagataaggtcagacacagcacagtggcagcccatatttaagaagaaagggcaagaattgcaaagttaagtgcaaatggctatagaaaaagaaagagaaataatttatggtcactttgtaatctaccacataggacaaacacttgagcagtgcagcccgggatatttaaaaattgttccctcacctactactggccagtgaagaaagcaaaagtcagaagcaagtctttaaaaactaggccttactaaatatttctcttttgtgtgtcaaccacgactgtcactattaaatagttttaagaaaatagtctttaattttttaaactaaaagcttccatttccaagctcatttattttccagtggaaatagtatttctgaaagaggaagtgtgttgattgcattgagaaggaccagcatcttgtccccatggtaatggcatcttgaattctccaagtgttcaccacctggtgttctgaagcccagtagccatacagtaacacattatacaatgtggaagaaggaatctacttgtataacatgtacaatgacagtgggcccacaggtgaagtttagaatcaaattaaaattatggcctatgaaataataagaatatggttaaattgctaaaaataatagtcataataaattagtctttcttgtagaagatacttggataactctgctacctgtgaaaaccactctttgcaacaatattggaataaaccatgttttaatgctttttgaattcatctaaggcatgaggtttacatgcacatgtgcgaacacacaggactatatatacatgcgtatatatatatatatgcacacacacacaattgctgagtcttgaatttgaaccaaaatgatagcagccataattggccattcttaattactgtattatttaaaatgattactcctatcctaacttactatagtcttttaaagaagatrtttaaaaatcacaacgtctaagtcataagatatttggtgaatggttgcctttccacagaaatwattctgtcccccaaacccttgtctcagttggtgtcactggggcttttggaaattagaatttagattcaaatgaagctgcatcttcacgcagtgattttaggtatataagtgacagatttgatatctgtcagtatctatgactactattaagctacacaggaaccatgagagaacaaatccttgctcactgtgatagctgaatggctgcctttactgctgaaactgtgaagcaattttctattgtaaaacccatagtaacagaattcaggaaggtggatccctagggggattgaagacgggatgtgtgtgggatgtttttgaatgagtcactgggcagagttggaggtgttcttcaaattagaaacaggaagctagtgggttgcttggaaaggcagacgtgagctttgaactaagaagagacggaggtcttcctggaccctgggagggatctgacatgaggcaraaaaattcccaggatgatgttatcctcctagagggaatacacaaagtatgaaacctaaatcctgacactaactgcaaacatgcaaacagtagtttaagactttccccctcattggctactgtcatgattaaagaaatcattgtagcaaatgtgccttaaaattgtaatccacaaagcactttcctcttcactgggggttcctacaggagtagtgaggaaaaagaaggtagggggagattttatgaaagaaaacattgccgatgtacacctctctcccctgttctccttccctttttccccttccccgagctgcgaagaagccagctcccatggggctctgagatctaggatatgaagggaatatagagtggaagacctttctggttgtgtctctcaggtcacttgacaactggatgttcgttatcttaggagaaggaattcatgctcaacaaagattttccttgcttgtacttggattccatgagggcccatttataattcaccctagatagtcacacagatgcctatcctctatatgtcattcatttgttgcaatcactctatgatgaatatatttgtatgtcactaatcccatatccacaatgccaaaatctaggaggctctatattggaaagttcctttcgtagttttgatggcaatacctgacttgaattccatgaaaatagtaatacattttatttatctctttcagtggattattgatatattttactgaaggaatatcaatatgtttgcttactaagtactgcctcagacattggggtgtcacawaaaattcagtatatgcatgacattatgttattataaaatttaaaaaaaccttgaaatctagtcacaagaacttcatgtaagagactatggatgtgtgttttctccaaatgaaggaggaaactgatgtttagtgaagttaatggccgggcttgaagtcacatagccaggaagtgataggttgggatttcacctcaggtatattgaaactccgtagtttctttctctaccaaacagcaaccagtttcaatgaattctttgtttcggggttaggaaattatttcgatataccactttcaaaagaataatgtaaaatgtgtttgagagctgttgccataggcaagcactcaccatcaatctatcactcaagttatagaagacggcaaaacctttcattgttctttcaactagcagaaggctgttcattccttgcacttttctctttagcattagtttttggctgacatactggctttctgtcatcccaaactgatatgctttggctctgtgttcccactcaaatctcatgttgaattgtgatctcgagtgttggaggtggggcctggtgggaggtgattggatcacgggggtggtttctaatggtttagcaccatcaccctagtgctgtcttgtgatagagttctcacaagagctggttgtttgaaaagtgtgtagcaccccccagtcttcgtgcgctgtctctcctgctgttatgtgaagaggtgcttgcttcccgtttgcccttctgccatgattgtaagtttcctgaggcctccccagccatgcctcctgtacagtctgtggaactgtgaatcaattaaacctcctttctttacaaattacccagtctcaggtggttctgtatagtctgtgagaacagactaatacacaacctgaatgtcttagtaacacaaataaaacatggtgagtttaaaggtagttccaaacacagtgtgcttgcccaacacttccacccacatggaccctcaatatatgaagtctgatccttgaaatcaatgtcactctttccagatttggttcttcagcttagtctgagtctatattcttttgtttttccttttatacactctgggaaagagtgttgtctgatatgatgcgatttcgacattttaagggctttttctaaagggcttattttatcttttgttccaatcctgtgccaaatcataggatttcattgatttagtggtgaatagttaggatttcatgattgcaatcatgtttattttagaaatggaaaattgagtaaggcagaaatcatctattcaatgcaatcatattttttaatatttaaaaatgctacataggtgtgcatataatacaggattgggaattggaaagttaggttctggtttctgctttgctattgcaaaaaaaacaaaacaaaacaaaacttaatctttggacttctgtttcatcataagttaaagaattaggtggctctaaatgattttcatataataacccagtttaaacaattttgtgaagagtcttaacactatgctacatgtgaaacagagcaacacggcagtaataatatctctaaagtgcattttaaagacttttatctatggccgggcacggtggctcacgcctgtaatcccagcactttgggaggccgaggcgggtggatcatctgaggtcaggagttcaagaccattctggccaacatggtgcaaccctgtctctacaaaaatacaaaaattagccaggcgtggtggcggacgcctgttaacccagctacttgggaggctaaggcaagagaatcacttgaacctaggaggcggaggttgcagtgagctgagatcacgcctttgcactccagcctgggtgacaagagtgagactccatctcaaaaaaaaaaaagactttatctaacttcacgttttcttactagtgatttttttcatcttctgacttgctgcaagagggtatttccctagtttcaatggttttgaagttaatttgttcagcttctgcttagtggatatttatgagaggtaatacttgcctttaatttcttttcagcttttctactgctgtctttttcttattacttctttttaagttagctccgactttgctatttttagagagaagcaataaggatggcacagtggttacaagaggttagaaacaattgagatgagaatcctatttttgttgatataatttatatgcaattcgtagcttcaaaatgaaacactgacatggtcatctttttaaaactaaaaaatgatataaaattcctagtgcatgtgttttaaaaaattctttcatagtgaacaaatcatgcaagatattaattttttttccctaaaagactattctaaagtctccctgaacatgtcacttcaaaatgtaaacaaagaaacaaaactgtcatctattggagttgggtgtgatttttgtcttttgtcttctctgtcacactagttttcagttctttgctgtcatgtggcccacttttcaaagatgcaattatgtggatttcagggggccgtcagcttgccttccccagttgctctgggccagctctggtctccagatacctctgatggaggcgagtcccaaagttgataactaggaagagactgtgtatgccagggacggatgacaagatgtgctgagccttggggagacgcggcaggatgttactaatgaaagagggccctgctgccgagggaggggaaggaagcagatgtgagggcaagattcaggtgacaacctcagcgttccagagatacaggatgttatggaggagggagaaaagcaagttggcatttggcagaatgcacagaggcgagactcgagagtgggcggtggaagctgaggctttcaaagatttctgaccttctgcctgccaacttggaattagatttcttgatggagggggagaatgggggaagggggtagaaaaggcagatgccaagagagattactgatttggcaaccagacaaaaggatgctgtggctggcacctgcagcagagaagggcagaacggtgtagccagtaggtctaaggcaatgggctgagtgccagagtttgagctgctacagagcggcctgagatggcctcttttttagacacgagaaaatagtctgtagagaaataaaatttaaaaatgagaaatttaatatctttggatagatttttaggattggcatttacaagcgtattcagttgcctttctcctgtctgaggagcataaccttttgtggtcagattgatgatgctctttaaaaaaaaatcccagcaatattgttacatttccaattccaaaaccaaagtggtgggatttgactataggtttcctcatttccccagcagtgaatacgaagtgacttttccatgtcccaaatgttgacccagaacaatatcattccctgtgagacaggagtaactgattacattagaatacaattttgttgccacagaaatcaggaaactttaaatttagcagcttccttctagggttttttgctctgggctctcagcaagcgtttgcgtttctacgtcctatatcaccgtgcaccactagatgtcactgttactcgggtctttgggtaacagactcaacaatatgcctgaccttttgtgcctggggaaaaacaatcttcagaaggggaggataatactgtctgtgtggatttaaataagacctctttacctggcatttttatcgaaaaacagatactccatatgttgtgttgattgctgtttccctttctgtttttgaaagggagagactgaattaaatgcgtttcttcccacaaatgtaccttaccatttctccttattctcaattctcccttaaaaatgtagcttttagctccataatataagaaatatttgttagaaaattaggaaaatcatcattctatgggtatttagaatctatatatggactgcaaatgtttcttccctaatctcttcctaaccttagagaacttcaaaatgcattgtctcatttcctaaggaaaaatgttgtaactctaactaggaaaagaatcctgtgagagcacagcaagtcagcgttaagaattgaattttcatgactaccctcggatacatccttgaacctaagggacaaatgttgccgtgagtttcaggttgtttaaatggtggtgttagacacacaaatcattcattttcctgctaaatttccttttcttttattgaatattggatacaggtatgtcttttaagatgtggccattgattcatatataccagagcattatttaaacatgaaattaaataagataattaaataacaatgcatttataaagcgttcttgaaaatagattaattatttagagcatttgagtgaaaagtctcaatacgatttcactatagcaaatggannnnnnnnnnnnnnnnnnnntctcaatacgatttcactatagcaaagtatagccattaataagtcataacagggataataacataaaacaaaaaatgaaaaccttacaaaatatatcttaaaaagcgaagtagggctttactttgagttgagttcgtggtacaaaatgaatcaatttgttctttttggaactttatctccaaccgtgtaatatttgtgtctttaactgttggctgcttctaacagttactgagccaattgacctccaaactaggactacatcaatctgttttctctctagctgcgatgccacagtatttataggttattctgcactggaattttaccccctggagataacttgtagctatgggccaatgccaactcattctgactcaggtggggataatagtccttaagatgaagttgccatggactttaacaatgtttggggtcttattctctctgctcctgttcgcaactcctcacactttttcccctcccctctcttcctcttcccttcaattctctgttctgtattcttctctatctctttctttttcctcctgccctttctgtgttttccttccatatgtgtgacccttagatttgttgtagaactatattggagatcgaattatgatcacttctatattagtttccagtggtttctgtaacaaataatccaaatttggtggcttaaagcaacaggcatttattattttttagttctggaggtcagaattctgaaacccatttcctgggctgaagttaagatatcttaatttcagagctgtcctccctatgaaggctctaagtgtatctgtttcctcgccttttccaacttttagaattgcattccttgcattcttttgctccccaccccatccttcaaagccagcactgtagcatcttcaaatctccctctctgctgaggccatgacattgtcttctctcttttgtgtcaaatctccttctgcctccctcttgggacacttttgagcatatttagggcccaccttgataacccaagttaatgtttccatttcaagatccttaatcacatcggtaaagccttttttttttttttaatataaagtaacactacgagttccagggattaggacctggatatatttgggggccattattcagtctcccacagctttttagctgtgtggttgtgcaatttatttagtccctctaaattttagtttccttgccaaatagtgttacagtgaggacttaatgagaaaatgcttgcaaagtgcttagcatagtgcttggcaaagagttaaagccactttaaattaaaataatttaagtgctaataaatattactcctgctatcaaataagattatctcattctttccctcccactcatctttatggtacttcaatctaccttctgacctcatctctctaccagaacatttatttcaaggtctccagtctcttctagctggtcaaattcttgggcttcatttagcagcatttaattaggtaaaccacttattttacttagaaatgcattcgttattttgcttctgccataacatattttctgtttttttttttctacttcactggatacttctgttttctttactgtcttctccttcttttaatctacagtaaaatattggtgttcctcagaattctgtcttgaagactctttgtctatttttatactgagatgaagagtagcctggcagtttgatgatcttaaagaagatagtggggcaggaatacaggcagcaaggggtgggaatggcatgggacagagctggagttgtggtctggatcagattctgtggtgactgacaggccctggtataaggattttgacattaatgttaggagtggtgagatgtgtcttaagcctcagaaatagattttgacattggtgtattaagtagatctctgagtcagtttgagttgctataacaaaataccatagactaggtggcttatttatttttcacagttctagaggctggaagtttgagatcagggtggcaacatgatcagtatctggtggaggccctcttccggggtctagactgctgacttctttgtatgtgcacatgatggaaggagggtgagagagctctccctggtctcttttgtaagggcacttgtttcattcatggaggctgcactctcatgaccaatcacttcccaaaggctctgcttcctaataccatcacattagtggttaggatttcaatgtatgaattctgagtgggtgttggtagtgaatgcctgaattatttcctttccaaaaggtctacagctcatgaccttctcctttctgaaagctgctgaaccatgagctaacctactatctggtaattctgagcttggataaaagggcaggagagagatgtcagaggtgtgagtggaatgtcaggggctcagctttaaaccctatatttagtaagaacatgggaatttcctatgagttggaaaaacaccactaattgtggctgtgatttaggcagtactgtagatacctttctgctccagctggtgttaaggcaagaaggaatagccttagctataacctggtctcctagccaagggacatgcagtgggagaggccaaaaaggccctccaagaacgtacaaagagccaatgcttggataactctctcaaaggtgaaattgccaagtagtcaatgttcaacagagaaaatagcaacaacctaaagaaagagaatggtgggcctgtcacccaccatcgtggttgctccagtaactatttctctccctgcctcctctcactgctgctgaagcttcgatggagagtgctttctctggagaacacaccccttcctccctaccctcaaacacttctagtcagtagtgtgtcctgcttttgtggaagagggaggtgtttaaataaatataagaaaatcttaacccaaactgaagaaatgtcataagaatgaggtgagagatctataaggagcttgtacctaggtaaaaagaaggtgaaaggagacatttgataggtattatttgggaagatgggaaaataattccatgtttatagtttaatgagtttagattcttcaatcaaaacaagtaaacatatgtgatttaattttattatcattttgctctgtataacaaaacttcgagttaagtgttcctaccgtgatcttgcagataagtaaaatgaggtttcatgaaatcaagtgacttgcccaagggcaccaagatagcaagatgcagatgagggactggagccctcctgtacttgactttgaagcctgtaccccttctcacccactgtaccgttacgtataccatgctgttaaattggtctcatggcagtggtgagtttagagtttaaaatgaataactattaatgatattacaattccccacatagatcagtcacctaaaattgcaaagggtaggatgatgcaaataattggctaagtctggaggcataatagttctgattttgaagttagattctgctaagactacagaaagaactatgctactcccctaggtgttctttatccaatcactctggattattttaaccatagcaaatgatttttgtattgtctattttccttcayccaccccctttagaatatcagctcaatgacctttttgtcttttttactgatgttttgcaagcaacctagaaccaaagcttggcacttaagaggccctccttaaatattttctgagtaaatgaatgaaagaagaaatgatatgtaagctaccacctaaattctaccctggagttacaggcaaaaaaagaaggataaaaaggaggaagaagaggagaacctcagtacagagcccatctggttattcaagagtcagtggttggcaacactgcataaacatgtcattatggtcactggttgtctttataatgggtttggtgacacttgcattaaaaaaatctgtgaagggacagtcaccayaagaacccagttgcatcaaaattctttttccaaaagcctaaccaggtgctcagcttcttcgtacctgggcgacaatttctaagacttttgtcagttatttgagtggttggggtctagcttgagtcaaagagacttagacaaataagcataacagatatgctggtatgcctgctagaagtttctttctagagagaccaatggtcttcttggtgagataatttattctcaaaggaatttgattttcatccagtaatgaagatttcttgtttgagtgcaagagcatacaaggctggagtgcaatggtgcaatctcagctcactgcagcctctgcctcccaggttaaagcaattctcctgcctcagcctcccaagtagctgggatgacaggcacctgccaccacatctggctaatttttgtatttttagtagagatggggtttcaccatgttggccaggctggtcttgaactcttgaccttaagtgatccgcttccttcgtcctcccaaattgctgggattacaggcatgagccaccatgccaagcctctcagcgtaacttctattagacatgtagctgagtcatatggtggatgtagatgtgtttggcagaggggatgtgtctgtgtctgagagctcaaagtgaaaagttactggattcaagtcatcataagatatcaaggtccaagcagccctactttgagatcccttcttaggggaagcaaccctggtaatgcaactaggggtagttgttgaatgagctgaatggcattggtagagtcgttcatgagttcatgtgaaatgctttgcagaacctcccagaagattgtgaaagggtttgagggacaaaggccaatgaatccttactgttgtactcagtacaaatatgcaggtaaatttacctagctgtttgaataaatataactacttttcaaaactcatcaatccatagtctacttaaaggcaacatacataattgtaatagtttcctgacaaatgtagtcaccttcattctattgttttagatgttaaaggaattaattaactagattaattaattaactcccctgccttcttctccaagtgagcgtcattgtcaatgtcctgatgctggtccaagctatcttttctccatacatgcattcactaactgagatgtcactcattcagtctggtgtttggcctttggtatcactycttgctaccatcatcggagatgtcagtgttaccatttggtggctggctgcaaagtgctctgctgcagggaggttccttgttctgaccccaggacgcttcaaggactccctttcagctaagttctgcgtgcttctagggaccagagagattgggcttccctcccatgctattgctggctgggcaaaggatgtctgtttgactgcctcaggygctctctgacaaacttttctctgttgcaactacaccaggggatcctgcattgggagggaaattgtaggagttattccctctttggagtcccctcctaggaagataatatgctttctttttgctcagattttaaagcattctgggagttctattattgtctcccattgtgaggctagtcaagtcatattttgattatacacaaaggtggatgcttaagatcacctttcagaactgaactcttggccaggcatggtggctcacacctgtaatcccagcattttgggaggccaaggcgggtggatcacttgaggtcaggatttcaagaccagcctggccaacatggtgaaaccccctctctactaaacatacaaaaattagctggtcatggtggcgggtgcctctagtcccagttacccgggaggctgaggcaggagaatcatttgaatctgggaggcaaaggctgcagtgagctgagattgtgccactgtactccagcctgggtgacagagcaagacttcatctcaaacaaataaacaaaaaaaattcctgagctcttgatttcaactctttctcttccagtstttctcatcttagaaaagagccccccatctgccagaggagtcatctccaggttctgcctttttcatccactcccacatttactccaacaccaatcctgtcaactcagcttctgaaacaccattccaccacctccagcatggccacctagccaccattgtttctagatgattctgtgacaacagccttctatgtctctccatatccacttttgcttctacaatccattttccacaatgcggacagagaagcttcttaaaagtgtaagtctgatccccctattctgtagcgtaaaaccctgttaatggctttcccttgcactttgcacaaaatgaaaacctacatagactaaagtgatttacttcttttctaatagaatcctacttctcttctcatccaccttgctctggccccacaacctttccttaagttcccgtatgggatgcttttccctactttgaccatgctcttccctctccctggtctcacccctgctgcccacggcatggctggctcctcagccctcttatattaattgatataccattagaacctagcacatttactggcacataataatactaaagtaaatgcttgttgaattaatgaatacttgaaaagaaaccactgctgtggaacgccattgttaggagagaggattatggggccagacttttctgaattcagatcccttcccagttgtgtgacttggacaagccacttactctctctgtgctcaggttcttcactgataaagtgagggtcataactataccaaccacatagggtggttttgaggataaatattttaaatatattgatatatataaatatgcctggcacatagcaagcattatgtgttagtgattattagaagagaggagacagattcaagagcattgtccatgtggacctagagaaggtgagttggaaggtgggggagagatcttggcatgacattgacaaccccctggtgagagggcaacagcatgggatgtagagacccaagggcttcaaactgggcagggaagggggcagggtacaataggtaaatcagagagacaccttggaaaggagagcaatctgtattctgtctgagagaggggcttcaggaggagtagtatcaagtgagaccgccaccaacaacaaaatagtcatggctgaatgttgcctgtggcttgcatgggactgtctgtcattgacagggaccaaacagctcccgatttgggcagggatttatgaaactgatactttagaatttatttttctctgtgaaaaaatcctgatcaacaatcataagagagaaaaggtatgcatgcttgcagacctgtggtttgaaaattacttataattctcctattacagtctgccatgaaaatacctcagcctgacaagatcagagctactgtcatccttttacatttaattttaatttacacgaaataatgttcttcctgctccatttcttccaattcttttcttctcctcccctgttcatttttccttatcacttcaaagttactactttcagcaatgtcatctcttcttgctgtaatgtgcttcacctttatacagctaataaaggcattattttcatttcaaatttatgtcttctgtggctacacttctgagcagtagaattaaacttagaaaaaataataagctgactaataggaacgatttctcttttattaacaatcactggctgacattattttggaaacttttacttttgaatttaatttagaaattcagggagcactagaaaactcagcaatgcctcttatttttgcctccttcttcccttccttttccctacctgtcttcccttttttccttttctatgcctttataacatttcataacatgaaaaaagatatattttatattttggctatgagtttgaatattttctaaaccttggatctactgctaatagatttacaaacaattttctttacaaaactgtttgctgtgacaaaagattctgcattggggattaactttagcacaagacttctgctaactgagataaatacacaatgcacaattttaggggtaggagtttagtttttttttcaggtcagcaagtatgcatttactagttaacgcttttagagtctgaatactgtcctggatgaatcatgaacttgctctaatttggtaattctttatgcttttatgtgcttgcaccagagctatgcgtcttatcataatttatttccttcataattgttctgctttggaatatggaaacactcagtgctctgatttcttctttctggtaaattcaggtcagcttcatctctcatttcaactctaacctcttacaaaaggccaccacattcatgatatctggtgttgaaagttctgagagactttacttttgcgaattcattttctcccccaagagatgagggctactattcttttgaattattgcatccattttagaaaaggaactaattattttttatttaacaaggaatatcctgtgaccgatataactggattcatgtgaaaatgcataagaggtgatgaggagatcatttcctccaagaaaatgtaatttcaaaagtgatttaaatggaacataaagtactcatgaatatggttgcttttatagctaatgcagatatcttacttctatcactgatattcctgagtgttttatgctagcagattctctgtaaatgtttcttaatattaacagtttcctcatcctcacttttgtgctgttccttggaaaatttacatggagttttgaaatgtatgtgtgtacatagatgcagatctcacattttctaagataatatcattgttggtgaccttgatagttgtgtgtgaatgtgcctctacagaatatggtttcaccaatacttctctccttgctgcataaagatccatttttgtgccctggcttgtgatccttccttcaattacaggaaaagctttgtttcttccagggcacatgctttgctgcactgttgggagttttatgacaattataaatttacttttcaattttctgtattacagattccatttcagttctgtacaactggctacaattttaaaaatatcattcattctgtgtacgctactcatctcagcagaaatgcttggaagataacaatttttccatgttattgactttgatgaacctcattgctgctgtggaaggggatcacagcaaagcaaaacaccctcaacattttagcagagaagagggctctagttagaaaacttggctgggagtagtaacagttactgcctccattcattcattgatcattaattcaaaatctttaaactaacatttattaattaaaaagcagaacttcttgctggaacttttttttttcatatctgcttaattttctctgaaggagcttttatcttgtaatttaaggaggatttgttgttgttgttgtttgggccatactgtttacatggtgaccttgtagagttagaatagatttcagttgttgctaagaaaatggactaagatgccaagtggaacatcatcggggtctagtcgtcacagtcatagacagttaactgcaacactcttcctttttggccttccagtttgttgatgttcaatttaacgtggacaccagcttttatcagtttctaaagacatgctgatctgggcttgatgctctacctagttattcatgtcctccttgcaatgagaggtttctacttcactcccaactccacaatcctgggattcggaaagcaaatctccaaaactactgccaacttctagttatatgttattgatggaaacttttgaaaccygatacaggctgctgacatttgttttgtaaaggcaacttatcatttcagaataatacacatcatctaaaaagcatgtcataatgagatatatagcatctctaaagtaagtccaggggcagagttatcagtgtgcactgaagcttccagataacttgcatagtatgttttgttggtgcttacagataatcccatgcttcttttcaggactaaataaaactgataccatcatgtggtatttcattcctttgctcacgaaaggattagttaagagacgattatttctgaaaaaaaaaaagatacttatattaaaatactctgccaattctgtaatactctctcttcaacattctattgcagaaaacatcaagtcacctagcttcagctctgcttgtcttttatttgttctggctaaccactgtgttcctcttattcctttgagagggaaacatactgatatatatgtagtgtaaaatgaatatggtgaatctagaggggcatctaatgaccatagcatatcagcgggtgatatttgactcatagtcccaaacttctgatagtgttaggatccataatctactagaatacaatttccagtgagagtgatgcttcttaaacttttaatgggcacatggatcaccgaaggaccttgtgaaaattgcaggttctaatttaatagtcctggggtggagactcagattccacattgctgcaagttcagcacttgaaccaggcctagaggagaagaacattttttattttaaatataggccctatactgctaagagttctagataaaatggacatttttgatgtccatgcagagaaactgagcccagtgagaaggcctcactgccgacattcacctgctgagcggacccactccaaattctcagcacagcattctgacagcattaaattctttattctgaaaagcaccgaacttgcgcagggcctgaaagtatttgacagtttctccagtccagtggaaatctacagagacagcttggatggagaagggaagcagagtacctggaggcagaaggactgggtttgagcccagctttgcctctgcttggcttcataggcttgaataagtcatagaccctctttcagtttccatttcattgtgtataaattagtgataatagtaaaatgcaactttatagatttgctttgatttcaaatgtgataattatgtaacagtgttttgtcaatgtcaagtgctacacaaatattagttgaggggcccataacctgcaatgatgatttacactcacatcagtacaccagcgttgcctaagctcctccacttttttgttgtttgttagcaatgaacattctgactgagaatgtagtattttattgtttcctctggatgccatttgtatacatagtttgggtataattcttcagttaaaaaaaccccaaaatattatttttcccttaaaacaccagcattgtcattactctcccaatatgttttggggaaagggggagggacggctagctgtatgagagatagtttaggactctggaagatctatctagtgttgtgtggtggtcatggatatcctgagttacccacaacttctgagaattgcttgatcaacatggaggtaaagttggtatcaggagaacatgctgtccttgtcacctagggaagaagttggcctacaggcagctttcattttaattgattttttgatgagcattgactttattaaatcctatacaaaatgccccatggcatctgtcagtgataagtgacaagaaaggcattaaaagtttagtgaacgcttaagaattctttatcagcaggcattgattgaataccctctggataatgatgataatacttgcatttataacttgcaagatattcccataattctatttatgatacagttttcattgaatcacttcccttttctgacataaaaacccatcctcatggggcttggattttttgtatgcatattatagactgcagcaaagtttttattttagggagacaaaatatatcaaaatatacatcattgcagaaactaaaatgcccaatagctgctttgccatttgcctagtttgatataggcccattttctgctgcttttctttccagaccttctctgattttcctgccagtcttggccatgtcttttcatgcctgtcatttctcttctataattagaatacactgaggatttgtcattaaagtttaagttatatgaagcatccaaggtctttcatttaaggcactgtttggaataaggtagatgacactttccatggacatctggcttacagggtcttcccattgcaaatgaggccccattggaattattggactcattacccagctggccagacttgtgattgaagaggtgggtcctgagtgaggatccattctcttgcaggtgcttctgaagtgcttgttttgtctcagactcctgtggtggttgcattcattggaagactagttgaaaataaataggaaaaggccagtaagaatttctgaaaattccaagttgaggaatatgtagagaaaatggaaatttatttgtcaaaaatatatggaacatattgtatctgatgtaaatctgcatctacacatgaggaagttagaaagaaagataaaggaaataacctgctattaataaacagaacttttctaaatgtgtgctgcttgtattcaatcatttgtgaataatataatttatgtttaatcacacccaaagccttgccaagtaggtcccacaggaatttctctaacgaatacataagcatctcttgtattgagcccagtaattgcttatatgcaaatgattttaagtacttgaacagtttgacttaagaaggataaacattatgtctgtaatcttgtatatgatattcatttgcttagcaagccattttctgatgrattatataaaagcaaactttataatcaactgaatacaaattatcctgagtttggaaaaacaaattaatgaggttttatgatcttgagttccagacctctccaccatccgattcagtatgggacagcaacataacatgagttggtacaaatgacttaaaatttacattgatttttgcctatatttttttcctattatcttttatgtgaatccctaggtaattatgaaaaacagaatttatattagcattatggaattagacaatcaggcaactcgatttaccggtattagtgatagcaccttcacccttcatgccatttgtgagaatagatcttctagtatatttgtcaaccaaaggcaaccttggtgatacttctcttggatctcaaggtatcacctatctattttaggtgttaattcttaaatatgaaaaagtataatcataatgtctcagagttgtcaggaccttcgaacgtagcagaaattataatttccagaaaatcttttgtttgtagtttccctaccgcaataagaggcatgtttttttttttttgtttgtttgtttgttttgcacgtggagccagacaaatacacacatcaccgtcatccgccgtaaccacacatacacacacttattacaatcaggtgataaaataatttattattagaggcaaaaagcatataactaattttgaaccacacatatatgtgtccctgtacctgagaaacaggactttgattctgatcacggagtcaccaattgatataagagaaagaaaaagagagctcccatcaaaatccatctgaagtttttttcagaatctgtctaaaactcccctaatcagaattctgctttctgtttattcattttcacagatatgtgaccttctggatcctagatttgaggaaaatttcctatgcatgtatttgccaggatataccctctaatgttcatgtgttctcatcatttagctcccacttacaagtgagaacatgtggtatttggttttctattcctgcattagtttgctaagaataatgggctccacatccatccacgtcccttcaaaggacatgatctcattattttttatggctatatagtattccatggtgcatatgtaccacattttctttatccactctgccactgatgggtatttaggttgattccatgtctttgctcttgtgaatagcgctgcaatgaacatatgcatgcatgtgtctttatgacagaacaatttctattcctttgggatatacccaagaatgggattgctgggtcaaatggtatttctgtttttaggtctttgaggaattgtcacactgtcttctgcaatggatgaactaatttacactctcaacaacagtgtataagcattccttttgctctgcaacctcaccagacatctgtaagttttggactttttactaatacccattttgactagtgtgaggtggtatctcatcgtggttttgattcgcatttctctaatgatcagtaacgttgaactttttatcatatactcatcgggcacatgtatgtcttcttttgaaaagtgtctgtgcatgtcctttgaccactttttaatgggatttgaacaaatatttattatctattatctggtgaatacagtacaagatgctgtagatataatgataaacaaattaatatcattgctgccttcatgttgcttatggtccggtaataaacacagacgttaatcaactaattacacaaatatataatcaaaatgagatgaaagtacatgaaatgtatagaatgttatggcagactatttnnnnnnnnnnnnnnnnnnnnnnnnnnnnnnnnnnnnnnnnnnnnnnnnnnnnnnnnnnnnnnnnnnnnnnnnnnnnnnnnnnnnnnnnnnnnnnnnnnnnnnnnnnnnnnnnnnnnnnnnnnnnnnnnnnnnnnnnnnnnnnnnnnnnnnnnnnnnnnnnnnnnnnnnnnnnnnnnnnnnnnnnnnnnnnnnnnnnnnnnnnnnnnnnnnnnnnnnnnnnnnnnnnnnnnnnnnnnnnnnnnnnnnnnnnnnnnnnnnnnnnnnnnnnnnnnnnnnnnnnnnnnnnnnnnnnnnnnnnnnnnnnnnnnnnnnnnnnnnnnnnnnnnnnnnnnnnnnnnnnnnnnnnnnnnnnnnnnnnnnnnnnnnnnnnnnnnnnnnnnnnnnnnnnnnnnnnnnnnnnnnnnnnnnntgaagaagtttaagtgtaccagaagcacacaccagggaggataagtggaggcccgtatgagcaaaatgtctatggttgtattaaagaccatttttgaaagagagtgacatgatcaaattttcattttaaagtaacattttggccgcagtatggagattagagtagacatgggtgttatggactgaattgtgtccacacacaattcatatgctgaggacccaaaccccaatgtgactatttggagatagggactatatgatggtaataaaagttaagtgaagtaagaggaagggtcttaatcggataggactcatgcctgtataagaagaggaagaaacaccagcgtgtgaggttgtgagatctttctcttcctctccctttccctctttccctaccctgcacctgtaacatccacatagaataggccatgtgaggacacagaaatgaggtggctgtttgcaagccaagaagagaggcctgactagaaaccaagcttgctggcaccttgatcttggacttctaggctccagagctgtgagaaaatgaatttctgttgtttaagccgcccagtctgtggtattttgttacggtagcctgagaagactgatacaggaaactgtaatggatatgagagttctgggtaagggaccacagcagtggttcaggtacgagatagtggtagtacgtatgacagtgggaatggcagagaacaagaaaaatttacaaaattgggagacttttcgtatgtgtagaattaacaggatttggtgttggactgtatatataaggtgagagaaagagggattaaactttgtggcttaaactagtgtgacctgcacaactagatgaatggcttgctcactttaagagtcacaagaggagcatcaggttggggccgtaacccataagttcagattctctcacatgaagttttggatgcctttggatgtgttgaagagacagatgggactggagcttaaagagagaaatattaaacaatgctcacagaatctgttgctacgtgacttctcacaatgtttaatatgtgtaaatatattattgtgaattgtgactctctcatacaagcttatggtttcttgcgggtttctaaacattgacctcttttctgaatggagaatcccccagggctagtagtctgtagaatatagttggtaaatgcttgtctgtaagtgtatttttaatcgttctctttccctgctgcttgatattagtagcttttgattttatttaataagacatattttgggcacatgatggccagtggattcacaagttgtgggaatgaaacagagaagcattcaagacaagagctttggctatgagcattgccaaggtcctatagagtgcctggtggtagcagagctgaaagcccagtgcagagctggaacagcccctgccttccaggccactcctagatactgtacagagagagagagtgattaaacaacaccaccatcctcaagtccttgtccctctatataattgttgactatttttcagagctataccattcctgaagttgaatctatcttaaaaacttaaaacatgaatgtctttcttgcactggcctacaccaagttttcaaagttattacctagaggttcaagtgaattgagttttatgggcttagaatttagataaatagaacttaataagttataattctccttaatgtttctggcaaatatactgtgtgcaactttctacaactgactttttcattcaacttatattctagaaatttattcatctaactacacataaatttatctatttttaagctactgcataatattctatagcataactatgtcaaaatatatttagacatttaattatattcaactacattaaaaaaaacaccgtatataccaggtaaattagtagcagatacaggaagaggaagatcaaatataagaattaaatcattctgcctgctctttgccccaaagcttataaaagctacaaaaagtttactatattcatattaattacctcctcttcatgtttatttttgagagaaaaatgactggataaacaaatttccagaaaaactctttatgctaaattttattcctaatgtcaaatcctccatgccatttttctagttgttccaaaaaatatgatctttcacttttttagtgcttcctctccactccaattaaatcacttggaagcctgcattggagttatttatgagagcttattaaggcacacagcctctgcctttgtgtccctcgcagtgccttgctcaatgtggtcccacagatatttttggttggattttgaattaaactagattactttttcaattctggtgattgggtgaccaatgtgttcttgagcttcatgtgtgtcattacccttcagagagacaatttttcttttgnnnnnnnnnnnnnnnnnnnntattagtgatccatgctttctaatacccccttccaccttgctctgcactgtctacatgaagtatggccgcagaataattgctagatagttggagatgttgaactcaattatcaattgctacgaagtagagaaaagaaattacatgagccatagttttcattaggaaatattcatagaaatgaggttcaacctgtgttacaataaaatgttaataagacttttaagaaggcaattaaagaaacatgtttacttctgggataactgaattcaaatctattattcttcaatttggcaaaaaagggtagtttgggggtgatttaagtgtaacataggtatatacttgcttttctccaggaaaacttccattgttatgaagtttctacatgaataattttaattttttgagatctccctgtggcaaaaataaaacaatcagaggcatatttatatacttgctcatacctttccgctgtaatatgtttagtagcaatttaaattaccttaatttagggaggctcaaatcccctaagatccttcgctgtccatgtgaagatcagagtcaaggaaaaatgacactgctcagagcttagaaattctcaggcagaggcagaagtgggaagtcaaactatctgccaagaattaataagctaaaataggatgagaggagttccttcttccattttttttcatactccttccttcactgactctaagcagctgtggaaactgtcagtgccctgccactgtgcatggcaagcctagcatcagctgaactcgttggcttgtgagtgctgcctttgtcagtttcactcttggcatcatggaacgtgaccaacctgggtgtgaatgctgctgagctgytcttctgaaatgtcagaagatactattgattgcaactctggcattttataacratagtaagttccttgacaggctctctaggctctagcttggccatttacactacaggggagaagggacatttcttatattgtgtgtgcatttttagctttttaaggcagaattctggaatcagcagtcactttttgttggaattgctaatgccataggttcaaattatacagtatgcactgtataccactgtataacacactggtcaccatgactttggatataaatcatcagtaggaagcaaagtcagtattatgttgaacccaaaggaaggagatgaaggctacagcatgaacacagtaagcctgaggttaaagaacccaggctcttctgagttttaatctagcatattctgagcttcttagattgagtctttcttcattaccacattcttctataaattacaggcaaatcgaagacagataatgtcttctcactctttagtataaaactactggtactgaattctgagtattttggtcacactgtgtattcataggtattattcttgttggtgatcgcagcaactgtgcagataattgcagagttatcatctcgatatgattccttctgtgattaaaaaagttgaatatgtaaatgtaattctggagagcactgcctttaaattttattataaattttccacacacagttatgcgaatctaggacttcataagcgtcacttaatggtaatgattgtcagctttgtgggaaattttatctttatagatggactgaaagaatatacagaattttacatttgtgggaaatacagtgttgatgaaatacctaattaggaggatgatcttttctgagagggaaacaagtaaatcttctgtttctttctgcttaaaaagaacattaatgttccctcatctcttcctgaagccttcctcaggatggagataccatctgagtcacgtgtctcagagtgagaaagcagtggagtgcagatgcaggttttttttatcctagtgaaatgaaataccaattttctgggataaactgtaagttcagagaaaatagaatttcctggcatgacaattttggacattctttgagtgttcatcaaagaaggctgtgaattgcttctgtcagtatgactggcacaagctcttacaattgttgacagcttgcaattctttttactgactttgaaacaaattattgacaatataatgcagtaactttcatgttaatgcaataacaaaaataaatgattgaatacaaattttcaaataatacctcatacttagaaattaaacttcagaatgacctatatttattgtcattcaatgaccatttgattgtatcagggtttgcacttgatttcagttctaaacaagttttagaatttgaggtggtctccaaggtgtctacatagttgtatcggtttgggctaacactgtcattaattctgctggataaattgcttatgacttatgcttttactcagtggctgctatatttcaaattatgttgtaaattgtgctttagtcagattgtttctatgtcacagctagctgtgttcttatatgctgtaaaattgtttgtattstaataaagttcacttcttgatttatcatacttttacaagccaagatctcagatgataacacatatttattacggtgtttaatgctgctttccaccttttgattaaagacttatttagtcaactaaaatggggtttgatttaaattccaattaaccttttacttcctctgtgctttttcagtgcatagtgttattgtaccttgataatagagtacagttttattccttaattcactgaaaccaactatattaagccagtttgaggctctgaactccagttatactgctgggatgactaaactaatcgttgtgaaataaaataaatggttccctttatacaattcttaaactttattttctgaaatttctggaaatatgaataagctatttcttaataaaagttattaaaaatatgagttacagttttgcaaacttggatgagcatcgtatgaatctagcttttgacaccaccacctattcaaacatatttaatgcttaccttataaggtgcttaccttatattcaatttaattcaataagacctgggcacttgaggccattgtagtatgaagctgaatggcatttcctaactatgaaaaactcagtacctagcaggggaagacaagtacatgaataattagtatattannnnnnnnnnnnnnnnnnnnggaagccaagtacatgaaataattagtatattacatggtaagttctgatgaagtagtatatatgaagtagggtgcaatactaagaatggagaatctgatctgagacaacaggagaaggctttccatgagaggcggggcatttgaattatgtcaaagtaagagtctatcagacacatgaaaggataggggatgaaattccaggcaatagaatagcataatcagaggcagaaagcaatgaaagtgtatcgtggatctggaaaactctgagtagtcaggaataaatagttcgtggtatgtctgtgggagatggggaaggtggggtagaaaggttggtataggaagggtagtatattaagataaaaagtttgcatagccacatggctttttttaaactcttattttaagttcaggtttatatgtgtaggtttgctacataggtaaacttgtgtcatgtgggtttgttgtacaggttatttcatcgcccaggtattaagcctagtactcattagttatttttcctaatcctctccttcctctctgcctccatcctccacttggccctagtgtgtgttgttcctctctatgtgcccatgtgttctcattatttagctcccatttgtaagtaagaacgtgtggtatttggttttctgttcctgtgttagtttcctaaggataatggcctccagcgccatccatgtctctgaaaagacatgatctttttcttttctatggctgcatagtatcccatggtgtgtatgtaccacaatttctttaaccagtctaccattaataaacatttgagttgattccaggtctttgctattgtgaatagtgctgcagtgaacatacgtgtgcttctatctttataatagaatgatttatattcctttgtaatgggattgctgtatcaaaagcatttcttctttaggtctttgaggaatcaccacactatcttctacaatggttgaactaatttacactcctaccaacagtgtataagtgttactttttctctgcaaccttgccagcgtctgctatttttttcactttttactaatagccattctgactggtgtgagatgatatctcattgtggttttgatttgcatttttctaatgattagtaatgttgagcttttttttattattatactttaagttctgaggtacatgtgcagaacgtgcaggtttgttacataggtatacacgtgccatggtggtttgctgcacccatcagcccatcatctacattaggtatttctcttaatgctatccctcccctaaactcctaccccctgacaggccccggtgtgcgatgttcccctccctgtgtccatgtgttctcattgttaaactcccacttaagagtgagaacatgcagtgtttggttttctcttcttgtgttagtttgctaagaatgatggtttccagcttcatccatgtccctgaaaaggacatgaaatcatcctttttatggctgctatagtattccatggtgtatatgtgccacatttactttatccagtctatcattgatgggcatttgggttggttcccagtctttgctattgtgaacagtgccacaataaacatacgtgtacatgtgtctttatagtagaatgatttataaacctttggttatatacccagcaatgggattgctgggtcaaatggtatttctagttctagatccttgaggaatcaccacactgtcttccacaatggttgaactaatttacactcccatcaacagtgtaaaacattcctatttctccacatcctctccagcatctgttgtttcctgactatttaatgattgccattaactggcgagatggtatctcattgtggttttgatgtgcatttctctaatcaccagtgatgatgagctttttttcatgtttgttggctgtgtaaatrtcttcttttgagaagtgtctgttcatatcctttgcccactttttgatggggtggatttttttttttgtaaatttgtttaagttctttgtagattctggatattagccctttttcagatggacagattgcaaaaattttctcccattctgtagattgcctgttcactctgataatagtttcttttgttgtgcggaagctcttcagtttaattaaatcccatttgtcaattttggcttttgttgccattgcttttggtgttttagtcatgaagtctttgtccgtgtctatgtcctgaatggtattgcgtaggttttgttctatggtttttatggttttaggtcttacatttaagtctttaatccaccttgagttaatttttatataaggtgtaaggaagggatccagtttcagctttctgcatatggctagccagttttcccaacaccatttattaaatagggaatcctttccccattgcttgtttttgtcaggtttgtcaaatatcagatgcttgtagatttgtggtgttatttctgaggcttctgttctgttccattggtctatgtatctgttttgttacaagtaccatgctgtttttgttactgtagccttgtagtatagtttgaagtcaggttgtgtgatgcctccagctttgttctttttgtttaggattgtcttggctatgtgggttcttttttggttccatatgtaatttaaagtagttttttccaattctgtgaagaaagtcagtggtagcctgatggggatagcattgaatctataaattactttgggcagtatggccatttttgcgatattgattcttcctatccatgagcatggatttttttttctccatttgtttgtgtcctctcttatttccttgagcagtggtttgtagctctccttgaagaggtccttcacatcccttgtaagttgtattcctagctattttattctctttgtagcaattgtgaatgggagttcacgcattatttggctctctctctgttattggcgtataggaatgcttgtgacttttgcacattgattttgtatcatgagactttgctgaagttgcttatcagctgaaggagattttgggctgagatgatgcgggttttctaaatatacaatcttgtcatctgcaaacagagacaatttgacttcctcttttcctgactgaatatgctttatttctctctcttgcctgattgccctggccagaacttccaatactatgttgaataggagtggtgagagagggcatcctggtcttgtgctggttttcaaagggaatgcttccagtttttgcccattcagtatgatattggctgtgggtttgttataaatagctcttattattttgagatatgttccattgatacctagtttattgagagtttttagcatgaaggggtgttgaattttgtcgaaagccttttatgcatctattgagataatcatgtggtttttgtcattggttctatttatgtgatggattacatttattgatttgcgtatgttgaaccagccttgcatcccatggatgaagccaacttgattgtggtggataagtttttgatgtgctcctggattcggtttgccagtattttattgaggattttcacatagatgttcatcagggatactggcctaaaactgtctttttttgttgtgtctcttccaggttttcgtatcaggatgatgctggcctcatacaatgagttaggtaggaatccttctttttctattgtttggaatattttcagaagcaatgataccagctcctctttgtacctctggtagaattcagctgtgaatccgtctggtcctggacttatcttggttggtaggctattaattactgcctcaatttcagaacttgttattggtttattcagggattcgacttcttcctggtttagtattgggagggtgtatgtgtccaggaatttatccatttcttctagatttttcagtttatctgcataaaggtgtttatagtattctctgatggtagtttgtatttctgtgggatcagtggtgatgtcccctttatcattttttattgtgtctatttgattattctctcttttcttctttattagtttggctagcagtctattttgttgatctttagaaaaaaacaactcctagattcattaattttttttttttttttttttgagatggagtcttgctctgtcacccaggctggagtgcagtggcgtgatctttgcacactgcaagccccgcctcccgggttcacaccattctcctgcctcagcctcctgagtagctgggactacaggcacccgccaccacgcccagctaattttttgtatttttagtagagacagggtttcaccatgttagccaggatggtcttgatctcctcacctcattatctgcctgcctcggcctcccaaaatgatttattgatttttttgaagggttttttgtgtctctatctccttcagttctgccctgatcttagctgtttcttgttttctgctagcttttgaatttgtttgctattgcttctctagttcttttaattgtgatgttagagtgtcaattttagatatttcctgctttctcttgtgggcatttagggctataaatttccctctacacactgctttaagtgtgtcccagggattctggtacgttgtatctttgttctcattggtttcaaagaacacctttatttctgccttaattttgttatttacccaatagtcattcaggagcagtttgttcagtttccatgtagttgtgtggttttgagtgagtttcttaatgctgagttctattttcattgcactgtggtccaagagactcttatgatttccattcttttgcatttgctgaggagtgttttacttccaattatgtggtcaattttagaaaaagtgcgatgcagtgctgagaagaatgtatattctgttgatttggggtggagggttctgtagatgtctatcacgtccacttggtccagagctgagttcaagtcctggatatccttgttaattttctgtctcgttgatctgtctaatattgacagtggggtgttaaagtctcccattattattgtgtgggagtctaagtctctttgtaagtctctaagaacttgctttgttaatctggctgctcctgtattgggtgcatatatatttaggatagttagttcttcttgttgcattgatccttttaccattatgtaatgcccttctttgtctcttttgatctttgttggtttaaagcctgtttttaacagacgccccaccctgcttcggcttgccctccatgggctgcacccattgtttaaccagtcccgatgagatgaactgggtacttcacttggagatgcagatatcaccggtcttctgcatcgatgtcgttgagagctgcagaccggagccattcctatttggccatcttgccagcaacctgaactttttttcatatgattgttggctgcatgtatgtcttcttttgaaaggtatctgtttatgtcctttgccctctttcttaatggggttatttttttcttgtaaatttaagctacgtatagatgctgtatattagactttgttggatgcatagtttgcaaaaatattctcccatttggtagtttgtctgtttactctattgaaaatttattttgctatgcagaagctctttagtttaattagatcccatttgtcaatttttggtttcgttgcaattgtttttggcatcttcatcttgaaatctttgcctgtgcctatgtcctgaatggtatagtctaggttgtcttccagggtttttgtagttttgggttttacatttcagcctttaatccaccttgagttaatttttgtatatgatataaaggagtggtccagttttaatctgcatatgactagccagttatcccaacaccatttattgagtagggaatactttccccattacttgttttatcaggtttgttgaagatcatatggttgtaggtgtgtggtcttatttctgggttctctgttctgttccattggtctatgtgtctttttttgtaccagtaccatactgttttggttactgtagctctgtaaaatagtttgaagtcaggcaacgtgatgctgccagccttgttctttttgcataggattgccttggctacttgggctcttttttggtttcatatgaattttaaaacagttttttctagttctatggagaatcttcatggcagtttaataggaatagcattgaatctatcaattgctttgggcagtatgccattttaatgatattgattcttcctrtacagaacatggaatgttttctcatttgtttatgtcatctctgattcccttgagcagtgttttatagttttctttgtagatctttcccctccctagttagctatattcctaggtattttattcttcttatgacaattgtgaatgggagtttgttcctaatttggctctcagcttgattgttgttggcgtataggagcgctagtgatttttgcatgctgattttatatcccaagactttgctgaagttgtttatcagcttaagaagcttttgagatgatactgtggggttttctagatataggatcatgtcgtctcctaacagggatagttgaacttcctcccttcctatttggaggtcctgtatttctttcttttgtctgattgtcacagccaggacttccaatactatgttgaatagaagcattaagagagggcatccttgtcttatgtcagttttcaaggtgaatgcctccagcttttgcccattcagtatgatgttggctgtgggtttgtcatagataccccttagtattttgaggttccacatgatattttgatgcagcctaaaatgctaaaatattttactttaaattatttttgaagggtcaaataacacgcacaaagatacttttactccatttctgatactctttctgttacctcttccctaaacttcctagtaatggggtaaagatcaagattgtagagggctgtgagagatggaatggacattaaccaatgtccatttttggtttccctagatatctcaaactacagaaatgataaagaatgagtcagaacaattgctgtaagttttcctttacactaatagggctcaaaggtgaacacttgcattatgactaaaaccatgcctcactaagaatttaagtataattggcaccaggatgaatgtcccacatctagagacttccttgactctgtggagagaggtcaagagaaacttccagatacctacccctccttacctctaaactcaggtcatcacccacactatctaccttgaatctaccaggataaatcttatgccttctatccctgatttgtcagacactaaaggaagcccccaaaccagtcattcttcatctctagcactcctgtaaggctttgcatgaccatagtttcccttttcctgcctatcttcaactcctgaaacatttccattgtgttccccagaaatcagggtcctgcaacaggaaatactccatatgtgaccaccgtcttacagaaacatttaaatcacttgttttgctctaatggaagcctgtttctccacacctctactctatgaatccttaaaacacgacttccactttagctctctcaactattgatagttttctttcttagatctcatactcctggaacttgggtagagttttatgtcatcagcttatgttgtcatctgcttattcactcgctatcattttattgtcatctcaacctctgagttgttcgccttctttcatggattttttatttttatttttttaagatggagtctcactctgtcgcccagactggagtgaggtggtgcgatctcagctaactgcaacctctgcctcccaagttcaagtgattctcctcccacagcctcccaagtagctgggattacaggcacgcaccacctcttccagcaaatttttttgtatttttagtagagacggagtttcaccatgttggccaggcttgtttcgaactcctgacctcaagtgagctgtctaccttcgcctcccaaagtgctaggattacaggcatgagccactgtgcctggcccttctttcatagatttaagcaactaactacctgacacttttatcaacatcattcctgccctattcaattttaatttgatgatcctttcaacattctgttctccaatgatcttgttctttatcttattttatctctcactcatgtgctattattctaaaccatgtcgttaccaataattacagcccaaccaatatattaatttttggcattttgctctctgactaggcttgaattctatgggcaatcattatagatgcttcttgcacacatgctccattcttttgttcctctcttacttcatcgaacttacttggataaaccacaaccctagttaaaagagctctttgtctccttcatgcctgctcctgttcactgactggagagaaatacctaaatgtgctcaatggtcacattttaaattcatggtcatgaacatcaaatgagtttttaatgctatctggcaaacataatgaattttcctggactactgtggactcctatgcttctatttcatgctctctcctctttcctcaaacctcttaagccttgctctccatttgcaatctcaactaatgatattggtccctattttactgagaaagtgtaaacacccctaaacgaacttctgaggactcccacaactgcatctagtcatcgaatagcttttgcactaacatttgttgcctttgtgcttatatctgggctctgatctaaagccaatccttccacttgtttaccagattccattcttgtttccctatttgattctctttcctcttggaacctcaaaagtgcactttagcaattatctacattcttttattttttaaaaaagcaattatattgagatataatttatattcaataaattgcagatgtttgaaatgcacaaactgattagttctggtattgcagacatcatgaaacaattcccattatttaagataatgaacttacccatcactctcaaaagtttcctcatgtcccactgaaatccttcccttttcatccctacccactttcctatctctaggtgaccattgttttgttttctsctactacagagtatatttctttttctagaattttgtatgaatggaataatacaatatgtactctagtttgtctggctctttgaactcaacatattaattgatggtatgtaaatgaatagtttattcctttatattgctaaatagtattccgtgtatagctacaccaaaatctgtttatctattaatcttgtcaatttctacaaaatggatccgttctaaggaaattgccgtcttaaaaatattgaagtttttgacacatgaatatggtttaactccatttacttaggttttctttcattgtcagcaatattttatacttttgaatgtataggtactacacatttttgttagttttattcctaagtagcttgtatgttttgtgttataaatggtacatttttaggtaccaattgttcattactagtatttagagataaaattgattttgcatattgatcttgaaccctgcattcttgctgaactcacttatcagtttttgtatcttttttgcaatgtttcataaaattttctatgaagatgaccatgtcagctgtaactaatgacagttttactttttyttttttcaatagggctgccatttatttatttatttgcttgctttattgcactggatagaaccttcagtataatgttgaatagaagagatgtgaacagacatcctggtcttattcctgctcttaggagaaaagcaaacatctttttaccatttaatatgatgttagctgtagatgtttcatagatgccttttatcagtttgaggaaatacccttctgattctagtttggtgagactttttatcaagaatggatgacatattatgtcaaatgctttttctttgactattgagatgatcatgtggttttcaattttagttggttgctatggtgaattacactgattgacttcttctttttttttttttttttcctttctttttttgagatggagtctctctctgtggcccaggctggagtgcagtggcgtgatctcagctcactgcaacctccgcttcccgcattcaagcaattctcctgcctcagcctcccgggtagctgggactataggcacccgccaccacgcccagctaatttttgtatttttagtagagacggagtttcaccatgttgctcaggctggtctcgaacacctgacctcaagtgatttgcccacctcggcttcccaaagtgttgggattacaagtgtgagctaccatacctggcctacattgattgacttctgaatgattgaatcaatcttgcatgtctgtgataaaactcacctgattatgatattgttctttctatatattgtaggaagtaatttgctgatatttgtcaaaaattattgtatctgtgtttgtaaacaatcttgttctgtaattttcttttctcataatgtatttatctggttttggtatctgtataaagctggcttcatagaataagttaagaggtattgactctcctttaaatttgtggatgattcatgtaaaaatgatattacttctttcttaaatatttggtagaattctccaatgaaaccatcaggtcctgaagtattctttgctggaaggtcttcaacaacaaattcaatttttaaaatatgtatagggcttttcagaatatatattgcttcttgagtaagatctggtagtttgtctttcaagatatttttatttaatctaagttgttgagtttattggcataaagttaatatttccatattatgatcttaatagcagtataatttataacttatcacctctgtcattcctggtatttataatttgtgtcttctcttttccctaatcagtatggctagaggtcaattaatgttattaacctcaaagaataagtttttattttattgatgtatattgttttctgtcttctgctttatttatttctgtgctaatctgtactacttcctttcccttggttctttgggttcactttgctcttcattttctagattcatatgtagaagctgaggtcaatgatttaatatcttctaagttgtgcattagggctgtaacttttttctacatactgctttagtggcattccttaaattgtaatgtgttgtgttttcattcatttcagaatactttcagttttttaaaaatttaatttttattttaaattcaagggtacatgtgcaagtttgttagaagagtatattttgtgatgctgcagtttgggcttctatggatctcatcaccccgatagtgaacagcatactcaaaagaaagtttttaagtccgtactcctctccctcttttctaagcccccattgtctattgtttccatctttatgtgggcacccagcctgtttccatgactttgctattgtgaatggtgttgtgaaaaatacatgagtgcaggtatttttggggtagaaaaatttatttttctttgggtatatacccagtaaggggattgctggatcaaatgctagttctatttttagttctttgagaaatctccacactgctttctacatgggcagaactaatttacattcccaccaacagtgtataagaattcccttttctctgcagcctcactaacagtttttttttttaaactataaacattctgtcttgtgtgagacagtatcgcattgtggctttgatttttatttctctgatgagtagtgactttgagcattttttcatatgctctttggccgcttgtgtgtcttcttttgatgactgtctgtttgtgtcctttgcctactttttaattgggttgtttgtttttttcttcttgatttgtttaaggtttttttttttttttcacattggctttggaaactctgataactatgtgccttggggatggtcgtcttgtatgatatcttgcagtagttctctgagtttcttgaatttgcatgttaacctctgtaatgagatcgggacattttcatagattatatcctcaagtatgttttccaaattgcttactctctcttcttctctcacaggaatgctaatgagtaacaggtttggtcactttgcataatctcatatttcttggatgctttgatcattttttaaaattcttttttttgtgttgttgttgcctgactgggttgatttgaaggactgatctttgagctctggaattctttcctctgcttggtctagtctgctattaaggctttaaactgtattttgaaataactatagcgattttttcaattcctgaagctctgtttcgttctttcttaatataactatgtggtctttcaaatcttggatggcttttctggctttattggattggatttcaactttctcatggatctcattgcttctttgccatccagattctgaattccatgtctgtcacttcagacatttcaatctggttagcatccattactaggaatctagtgtgatcctttggacatgattaaatgctctggctttttgaattgcctgagttcttgctctgattccttcccatctgagagagcagtcacttctttttcttttggaatttgctgttgtttggatggggttgtttgtttttatactttttttcccttaagggtttgactgtggtgtatgttttatttagtccattggctttgcttctgggtacttgcagagggccaaggctctgtatggtttccatggtagtagatagggttctgcagtgggtttcacaggtgttgtatgctgaaacaatgtatttttgtttggtggtgtaatttaggctgcagctcagtagatggtgcataagagagggccagccaataggcttttacctgcactcacccttccttttgtatttcagtgctctggggagcggggcaagagatgactccctctcccagtctgttcctaggccttggtgctatcctcttcaactgcaccactgtgctaagttttctttgccccaaaggggactttggtgggctgcatcccctctttccctaggggtggttcgtgctgaaggttaggttgccaggaggcccgtgactctccagtgattcaccagttccctgtgcttgcaggagtcagagtgcgtgcattgttgggtatggctgcaggtggtctgttgatgcagtgggtcaatggtggaggatccccaggcagaacagtgatgctgtgagtgtgcaaccagtatgctgcccacagcctggggttttcagaaacattgaactactcaaatatttctcaatatgccttgatcttcagcatctcatttccttgtacatgctgttccctttcattgacatgcccttccttgttcgtcatccacttcttagtctaggccatcagagccacatatacacatccgactccctcaatgaaaattggttttctcttcatacatgcttttagtatatttaacattcgaatctaattgtttgattatgcatctcttttcacatatagctgtgatcaatgagaaatatttgatttgtgctttttattttatttttttaatgtacctagtaactagcatattatttggtacactatagtgaagttgttaagaaattatttgggatgataaaacaagatgatgagggaatgagttgcagtggcggaggatggaagagagaaagagagagagtgtgtgtgtgtgtgtgtgtgtgtttgtgtctgtgtgtgtctatgagcacatgtatgtggcagaaggggagttaatcagttggatgtgagtcatgaaggagatagaggaattaaggatgtcatttaggttttagcttggtcctttggataaatattccagccaccaggaagactagaggctgtggtggacacaaaaatagtctattctcctttaggagacagtggaaaaatatccctgaaatgttttatgtactctctcacttataaaggaaaatatgatgcctgcgtgcttgttcttacctggtacatgagtccaattctgagtcaactaagtgttgaaaaaaatactttttccagtattgggttatccttaattgtgcacaatattgtacatccactgacaatctagccacatttacagtcattaatatctttagaaaatttataactgctaaattgaacagtttttgtataaaagaattctaaattggcaatgtgatagcttgggtgacagaatatagtttaataaatcacccgtggttctatagatgctgagtgagaataattgatctgaaggaaatctagaagtttcactttggaaaccagttcactttgaggcttttattttgggtcacagtggtgcatttcagaggagtaatataaaattaagtaacagtggacattcttgtttcttctttcttcagttgtaatctgctctattgtatgatgggtaatcatcatatataatcacaaataaagtttctggttggagttgaatcacacaaactccaaatccaccgtgaaattctggaagaagattctcaaatataaaataaaggggcaagcatattaggatttatcaattttattagtgtctattagctatgctgaatatatcaatgagagaagaatctatattgaaacagactctttataaatctccattgctttaaataaataacatacatgaattaatattggacctgtcttaggaattatgggtaaagtgtattctggcttatgtaacagggcatgtatgtcttgaactaaggtatttggaaacatcttccacaattgtgtcatatggaaatcaggaaaactaatatctttttactcattatgatgctactgttttgaagayaaaaggaactatctttgaaagagaaagaatacttcatttgtacatgtgggaaagaaatacttccattcttctctatgtacttagaagcttctatttctgtttacctcttcttatatccaacctcatgagagaagactatgcattgagtcatatttgacaagtgggtggaccactgtgttacaacgcagacagttgtgctcaattctcttctaatagcagggtggaataatggatttaagtcagttcttgctattttcagtcttttactctctgtttaattatcaccacctttgtgattataggggacaggtcattgaggcagggtccattctataaaccaaactgacatgtttgatgccattcttcctcgtagcatgtagattacaattaatggagttagaactgtcatgttgttgaaagagtatttcgagaagttttttttctttttctatgaatatgccttttcacagagaacacacactcatgaagatgcacaaaacacaggcagtcttttgatcctctctagatacaatatagaaaaagggacagatttctaaacaaagatgagagcagaggattctatttgtcaccattctaggcagtgtgtggtgcaggctgatggcaaagaataggcatcttgttttagcagcctgagagttccaaagcaaactagaggagggaaacaacattggtctttataagtacaacatatctattctgtatctattctattgctggaggcaattttgaaggtaatggtatttgtttgggattaacagcatcaatttcaaaagtgatatctggttccttatactgttttaggggatagtattaagaaaacatgccttagattcaaatccttggttccagtctgagattttctgtttattagctgttgactcagtttctttcatttttaaaagaaaatttcaatagcttttggggtacaagtggtttctggttacatggatgaatgttatagtgatgaagtctgagattttagtgtacccgtcacctgagtagtgtacattatacccagtatgttgtttttgttaatctgtccccccttttctgaggctccaatgtccattatatcactctgtatgcctttgtgtacccataacttagccctcacttataagtgagaacatacggtatttggttttccaatactgagttatttcacttataataatgacctccagctccaaccaagttgctgcaaaatacattatttcattcttttttatggatgagtagtattccatgctgtatgtataccacattttctttattcactcactggttgatcggcacttagattggttccatatccttacagttgtgaattgtgcagtataaacttatgcttgcaggtgtctttttgataataatgacttttcctttgggtatatagccagtagtaggatttgtccatcaaatggaagatctacttttacttctctgagaaatcttcatactgcttgctacaggggttgggctaatttatattctcccmaacagtgtataagcttttccttttcaccatatccacaccaacagctattgttctttgactttttagtaatggccattctggctagggtaagatgatatatcattgtggttttaatttgtgtttccctgatgactagtgatgttgagcatttttaaatgtttctttgccatttgtatgtcttcttttgaacaatgtctatccatgtcatttgcccactttttgatgggactatttattgccaacaacaataaaaagcccgtggccagatagattcacagctgagttctaccagacattcgatagttttagtaggtgccagtcctattgaaactattacaaaatattgagaaagagagaatcctccctaactcattttgtgaagccaatatcactctgataccaaagccaggaaaggacctaacaacaacaaaaaaaaaacccagacagacgaatatccctgattaacatagatgcaaaaattctcaacaaattactagctaaccaaatccaacagcacatcaaaaatataattcaccatgatctagttggtttcattccagggatacagggatggttcaatatacaccagtcaataaatgtatgcgtaattccctcgggaatggcttagaaagaataggtgattggcaggacaagatttagtaatttctgggtctctggaagtaactacatctatttcaattcagtaacttctaactcaacttctaaaagaactagttatttctattagcaatttgaagactacttgcatcatctgtgaagtttaccataatgtcttgcatatggtcagtgcacagtaactacctggaatgagtgagtaaatcctagaaccctctctgtttatgaggaagtgagttgtgacacagagaggtgagagattagccaaacaccacacagttaggtaccaacagaccaagattagaatccacccgttctggtggcatcrcagaccattacttttaaaatggtttgcactgcttcttgaattgtttttgtattactttaaaatgataactcttctcaagggtgcagaataaacattatccacctacctacaaagctactagagctgagaaatcaaatgacagctttgagatactgagtattgtgtgtaatcaaattctactttggatgccagaaatcagaaaccaagaggcagctcttctgaataacacattcatgtaaacracactgccagttcctggcacatggtagttataggcacgtatatcaattcttgctgattttatcttgatttcttaggcgtttaagggtggtaagtaatcatgagaatggctaactcaaagcacaaagggttccttctgataaaagcactcatggcctaaatactttagcaggatttactcagaaggagaaatttttgaatagtttgaataattagcactgaacattgacctaatttttaagaaaaaaattctaaaatattagaaaaatactgtaggtttatgtataaccaaatatgtatctggttataataatatgttttataaattcaaagaaactttaggaattcaggctaactagagtttaaaaaacatattttctaaattcataggattcaaactaccaatagaaatattttttccttctcttataagatgtcacaataaaaccgtttgaattaaaaatctggaatgtgaattgttttcactttcgaagaatgataatttcagcatcatttcagaagacacttagttgtaacccttgaagcatcaacgtgttaaattacattttaataggatttagtttcaaaatgaaatacctatgctattattatatttaatactataatatcaactcctcaaggttataagctattgtttaatcacttaaaaacattctattaatgcttgatattgccagggcagtgtatggagatacaagaacaagtaaatctcaaattctgccctctgtcagtatggtgagatgagtaaatgagtaaataagtaaacaccagacagtgtgatttacataagagtagtggtaagtgcaaggcactctagaagcataaagaagattatgaacaggaaatatttcttggggtacacagctcttctagagtctctttttgaataccctttaaatacagtatcagatatgcctcatgcatgtcttagaaatcattatatgcaaatatttaaggataaaatattagcttccaagtacttaatcatccggaagaaaatagagcacatctaatttagtaaatgtttgaacagaatcttgttgccatttgtgaggaaatttgctctgggagagtatgtgtgaattactactggaatgtgcttcttccttctagccttccgtagtgctttctgtagttctatatctggaaggctaatcttctctctaggctttgctgaacagataataaaattctcttcttcttaagctgaatgcttcatcccaggaaataccaggagaaacagcaaacatatcccacattacattctgtcatagtaaatctttaagtgcagtttaatttctctctttttatgtgtaggttttttttttaaaggtgtattttaaatcatcacattagattttcaatggggaggaggaaaaaaaagagaaaaggaaatggatagttgcagatagagttggggagaagaacttgattatctctgaattgcagcctctgctgatgcagacagatgatccgcatgtgttgtgtgctctgcagagccctggagagctgccagtcgtgatccaccttaatatttaatagacatttgtacagaaacactgcatgaaagatgttaattgctcatgacattttattttttctttttttatttagcaggctgctcatcataaaacaaagaatgttgtttggctaggttgaaatttttaacgttcagctcttaaatttttctatgagataatttttcctgtgacaagttagtaataaatactttgtgcttgtaacatgcctcactccaaagacatcaaagtcatcatcagaaagtcactgatatttggaaagaattccagggcctttgtactctgcactctgctcagttctcctggaaatgctgctccaaacagtgagtctgagctatagggaaactctcttttctgtaccatgtttcttgaagtcttgctcagttattctgtggcaaacatcttaagtcctgaaggctcacagtccttctggttctatcacaatcactgaatgattttttatgttctctttaaatttcattcacaaatcagttttagtttggagagtattatgcacaatatctgtatagaagcaccaaataaaacgatttctaataacttcttaaggattacagcaaaaagagaagtgatacctggtggtaaatagcgacaggatgtattttactagacagttcttctgtaatagtgactttttttgacccctcatagcatcatccatgttttataattctatgttycttctttttttttttgagacggagtcttgctctgttgcccaggctggagtggcgcgatctcggctcactgcaagctccgcctcccgggttcacaccattctcctgcctcagcctcccgagtagctgggactacaggcgcccgccaccacgccctgctaatttttttgtatttttagtagagatggggtttcaccgtgttatccaggatggtcttgatctcctgaccttgtaatgcacctgcctcagcttcccaaggtattcagattacaggcgtgagccaccgtgcccggccaattctatgttcttttaatgcaacatgctatagcctctgattttaatgtgtttcttttcactgctttgaagtctttttctttttttctttttttttttttttggtctattcaaaagttacctcctctgaaaagtttttccagacctgaccacaaggctcaatttattatttttctattctagcctaaatgttttctcaagtgtagtagtgcctataccatggtactgtaattatttgtatacatgtttgtctctcttaccatgctatgannnnnnnnnnnnnnnnnnnnttgtctctcttaccatgctatgaatgctttgaagagagatcatctcttactgttttctgaatttttattgtctaacagggctggacccatacaaagtgctcataagggtttgttgaaaaatgcttttttataaattaccaaaagtttctacagaattaaaaatggcaacagatgtttaatttcaaataggttcctctctgctttcaccaaatcagcgtcggttcaaaagacatgttattgtccgtgctttaaaaataactaaaccatttcttgtattaaatttacatgagcatttgagaaagaaacaggaaaaagggaataacctatacatataaaaattagataaataattatggaacaatgttaactttataaagtgaatttgctgtgttaaagtgaaacattttaggagtttaaacagaaaaaaaatgctttcttatgaaaggccaatacggtgtttcaatttctggaaacttctacaaatatgttaaatgtaatcctttgcaatgttgcccctggagtaatatagtcacttgttttcttttgtatgttggactaggctcttaattttatatcttgttttgtctccttgaatgttatagcccacagtccaatcttcaagagaacatgaatataaccttcctgttcttccttactccgtagaacctcgaggcagttttctaacaaaattgttcagtgaattgctttaggccacagagcaagtaaattgtaataaagggaaaagagttcagatgtctgatttctctgcaaccccatctactctatgaagattataatattctatcatgagaccacatatttcataatggtctgtaaaagagtgtagattttctgaggtggtgtgattctccataaagagataaacttcacataaataacagacccttaatataatctacatgaaatgaagagctttaaaaatgtttatccccggcggggcacggtggctgtaatcctagcactttggggggccaaggtgggcggattacctgaagtcaggagtttgagaccagcctgaccaacatggcaaaaccctgtctctactaaagatacaaaaattagccaggcgtggtggtgggtgcctataatcccaactactcgggaggctgaggcaggagaattgcttgaacaggggaggcggaggctgagtgagccgagatcgcgccattgcactccagcttgggtgacaagagcgaaactccgcctggaaaaaaaaaaaatgtttatccccagtaaacccattcctgaaactcttttaagaaagttatcaaagattcgtactgaagaacttcatgtcattatcttagtaaagaatgaaaactattatatgttcaacaatgtagactgtaaataagtcacagtacacctatatgatgaaatataaaacaaaaatttaggtgttggaagatttttataaaggcattggagaatggccacgaaataacattacataaagaaagacaagaacaagttgatatataaaaagaaagaaaacatgtaatttttttagcaaaatgtatatgtgcatacacacatacacattagaataaaaatggaaaaattagaataaaaatgaaaaaaatagaattaagaccaattttctttgaaatttttcttatcccataataagcatatattgctatgaaatgagaaaaaaaggaattttgcaaggtaccaagttacagattaaacataagatctattggaattttactgtaggatactatgatttagggtagactcagtgaattatagagacttgttataaattatgtcttgcctcatggtatcctagaatatgtaagtagatttaacttgatgattatgggctgtgcatcaaaataagttggatggagaaaaacttttagaaacattcctgtaagtattcatctcagttctcttgcatgtgtgcatccgggaatgtgaatgtggaatccagcttatatattttgacaagttttctccaggtaattcagatacacataagtgattatattttactaccttggtttgaaataatgagattgaatcctgaatcaagcttaaaaagaagaggtgagaatggatgaagaggaaacatttaacttctggtagaaagataagtgaagtgctcatagctctctgaagaggaagataatcatgaaacaggtttgctggtatagattaccagcaaaatctatctgttacaaaagatatacaagagtagttggtatcttactgcttttttaaactcctgaactgagggtagggaaagggaaatgaacagaaatagtgtcttttggggttatgacctgagaaatagacttcagtcattataaagacatgcatacctaaattggcaggctaatttaatcaataattctgtcctttccagagcaatacacacagattaaaaagctttaattcagccaggcgtggcakctcacacctgtaatcccagcactttgggaggccaaggtgggtggatccctgaggtcaggagttcgagaccagcctggcaaacatgatgaaaccccgtctctactaaaaatacaaaaattagccggatgttgtgggggacacctgtaatcccagctatttgggaggccaaggcagaagaattgcttgaacccaggaggcggaggttrcagtgagctgagattgcatcattgcactccagcctgggcaacaagagtgaaacttcatctcaaaaaaatgaaataaaaaaggctttaattcctattactccctctcattttacatggtactatttttggtattttatttttatctagcttttatatcccacaattttttattttcttagcatcagtgtttgttcagattgctccaaaagtttggcagtttatttatacacaggggtatctttcaacctattttcttttttcattcaattatctcctgttaaaaattcagtgattcacttactgagagtatgactgataaattctgtcatgctctgattgttttaaaatgcctctattttaccctcactcttgaatatgtaaaaacaaaatatgagtggatgtttgtttagaatatgttataacaataagatgttttatggaagcctcatggttaccacaaagaaaataccagcagaggatacacaaaaataagtgagaaagtaatcaaattatgtcactacataaagatcaatgaaacataaaggaagacagcaagagaggaaaagtctaggtggagtttgccatgcttccatggttttttcactctgtgcacttacagagttagcgctgtgcagacaccatcatggtttatggcctgtacctttcggagtagtgacctaagccatacctgggtccattggtggcattgttagggcagtcaagaagtgatgcaccagaatgcagggagcagagactggagtggccctgggcagtgagccttatgttcccacaggtaccctggacctctcccttgaaactgttaggcctttgaagccctagcacactgggcttgttcagcctcaaaaaatctctaaactgcctttggggtcattctttcattgtattgttgaatagcatctggcttccttccatccatactacttaaaaaaaatcttttttttgagacatcgtcttgctctgtcaccaaaactggaattcattgttcttaaattctgccttccataaagtactagacatggacataattcagccaagttatttgccacttttaagaaggatggtcttccagccctccaggctggagtgcagtggtgccatctcagctcactgcaacctctgcctcccagattcaagcgattctcgtgcttcagcctcctgagtagctgggattacaggcatgtgccaccacacctggctaattgttgtattttttagtagagatggaatttcgccatagtggccagccttttctaaaactcctggcctaaagtgatgcacccacctcagcctcttacagtgctgggattacaggcatgagccaccacgtgcccagcctatccatactactcttatgccacacctttcgtattgtcgaacacaccatcttattctttacaatctggctaggctgagaattttccaaatatttaagttctgcttcccttttgtgtataaattataaacagttatgagaagccatgcaacatctgaaattctttcctgcttagcaatatcttaccaaaactggaattcattttttttaaattctgccttccataaagtactagacatggacataattcagccaagttatttgccacttttaagaagaatggtcttcctccctccagtttccaataagacattccatatttctgcctaagacctcattgaaatggcctttatcatccatgattctaccagcattctgatcacaactatttacatctctaagaagagtgtcactctctctacagctcttctcttttgatccctcaccagaatttccattaatgctgtgctcatgacagtctcggctgtttttagcaacctccaaattctcccagcctttatcccttacctagtccaaagctgctttcacatttttagatatctgttgtaacaacatcgttggtaccactttctgtcttagttcattcatggtgctataacaaaatacccaagactgggtaatttataaacaatagaaattattttctcacagtcctggaggcggactcataatcaaggtgccagcaggttcagtgtctggcaaaggcctgcttctcgtagatcaggatgtctaggtgtcctcacataggagaagggatagaagggcaaaaaagggggctgcattctcacatgagaggagagtgaaagaggtaaacttgcccccctcaagttcttttaaaaagcactaatcaatttatgagggtggcactctcacggccaagactcaaacaaaatcatagatgaaacaggagacattacaataaatatcacagagtttaagaagatgaaaagatacttttatgaaaaattttttgccaacaatttgaataatttaggagaaatagatcaattcctagaaacataaaatctatcaagactgaatcatgaagaaacagaaaaatctcactagaagtataactagtaaggagattgtactggtaatcaaaaatctcccagcaaagaaaagcccaagatcagttggcttccccagagaatatcaaacgtttaaaaaataattaatgccaacttttcaaaaaaaattgaagtggagagaacactttcaaacctattttatgagtctagctttggcctgataaccaagtcagaaaagatactacaagaaaataaaacttcaggacaatattactgatgaatatagatggaaatatcctcaccaaaacactagaaaacaaaatttaacagcacattaagataattgtactttacaaccaagtgggatttatccctgggatgcaaagatgtttcaacatatgaaaatcaattagtgtgatgtaccacattaacagaatgaaggacgaaaatcacatgatgatctcaatagatgcagaaagagcatttgacaaaatttgacatcctttcatgatgaaaatactcaaaaaaataggaatagaagaaaattaactcaacataagatgagtcatgtgtgaaatgtccacagctaacatcatgctgaatagtaagaaaatggaaagctttttttctaagatcatgaagaagacaaaaatgcccttttaccacttttattcaacatagttctagaagtactagccagagcaactaggcaagaaaacataaaaaacataaaaagctttcaaattagaatggaagaagtaatattatctctgtttgtagataacatcatcatatacatagaaaattccaaagattccacaaaaagcctgttaatactaataaataaattcagcaaagtttcaggatccaaaataaacatacaaaaatcagttgtgcctctatactttgacaaaaaacaatctaaaaaggaaatctcgtaaaaaataatcctaaaatttatgtggaaccacaaaggaccttaaataaataaaacagtcttgatgaaaaagctgaagctgttgacctcacatattctaattttaaaacacattataaagctacagtaatcgatatggtatggtactggaataaattcagacctatagaccaatgcaactaaataaagagcccagaaataaacccataaataaacccctgtatatgtggtcaaagaatcttctgcaagggtgccatagagaaaagatagtattgcaaaatgatactaagaaaactggatatgcacatgtaaaagaatgaaattacccttatcttgcaccatacacaaaaatcaactcaaaatggattaaagacttacatttgaaacctaaaactataaaatttctagaagaaaacatcgggaaaaacttagtaacattagtcttggcaattatttcttagatctgacacaaaaaacttaggcaacaaaacaaaagtgggcaagtgagagtatgtcaagctacatcaaagctagtgcacagaaaaggaaaaaataatcagattgaaaagtcaacctatggaatggtagaaaatatttgcaaaaccatgaacagaatgaggaatctgttatatctgataagggattaaaatccaacatatataaggaattcctacaactcaatagtaaaagaacctcccttctgccaaacacacacacacacacacacacacacacacagacacatacacacactaaagtaggtcaagatctttgacacataagtggccaagaagtatatgaaaacatgttcaacaccattaatcatcagggaaacataaatcaaaaacacatttagacatcacttataccagttagaataaacattacaagaaaaattgaaaataggtgttggtaagaaagtggagagttggaatccttgtgcactgttggtggtaatgtaaaatcttgcaatcactaaagaaacagtatggaggtccccaaaacaattaaaaatagtgttatcatataattgagcaatcccacttataagtattcatctaaagcaattggaatcaggatcttaaagaaatatctatactccagtgtttattacaggattgtttacaatagccaacatcaataggtgaatggaaaaataaaatatgatctatacatacaatgaaatattattcagccataaaaacagggaaattctgccatatgttacaacatgaatgaaccatggaggcactatattaagtgaaatgagtcagtcatagaaggacagatactccatgactccacttatatgaagcatttaaagtagtcaaaataatataaacagaaatggtggttgccagggttttgaatgaaggaaattgcaagttgctgtttaatggatataaagttccagtcatgcaagatgcaaaatgtctagaaatctgctttacaacactgtatttagagttgacaatattgtattgtacacttaaaaatttaggccaggtgcggtggctcatgcctgtaatcacagcactttgggaggccgaggcgggcagcttgcttgaggttaggagtagagaccagcctggccaacgtggcaaaaccccatctctactaaaaatacaaaaaattagctgggcatggtggcacatccctgtagtcctagctactcaggaggctgaggcaggagaattgctggaatccaggaggcagaggttgcagtgagctgagattgtgccactgtactccagccggggcaacaaagcgagactccatctcaaaaaaaaataaaaataaaaataaaataaaaataaaaatttgtgaagaaggtagagctcatatgrtatgtattttttaccacaagaaatataatatcagaaaattgaatttagcaatatataaaaatgctaacatatcagtacaaatatggtttattcaaggaagcaatattggtttaacatttgaaactcaaataaagataaaagccttgtttttctcattagtaagtaaaaaaatttgataagatgaaaaacacttttatgaaaagtttcagtaagctagaagttaaggaaaatttctcaatctgaaaatatctgcaaaacatctaaaggtaatggaatacttaatagtaaaatattgaatgctttacttcttaaagtctgaagtgagacaagaatattgtatcttcttttcaacattatactgtggttctaattagtaaaatagtgcaaaacgaagacaaacatatatattgaaaatgaaaatgtaaaacattatctgcaaacaatatggtttagatatatagagaatccaaaaaacgatcactgagaatgcataattaataagtgaatttagcacttttgttgagtaaatggaaaatataaaaattaattacatttctttatacttgtaacattcaaaatagcataaaatatcaaatatctaaaaataaatacaaaagaatatatgccagacctttccccagaaaagaatatatgccagaactttccccagaaaactacaaaacatttaaacaaaaaattttaaagatctaaataaatggagttcatttagataaatagaatatacaatattcatggaacaggagacttaatagtgataaaatgtcaattttccttaaattgatctttaaaatttaaagcaatattgatcaaaattctgacaacatttttttttaaaaagcttgcatgatgatacaaaggacatagcatagttaatatgatcttgaaagagaaacaaatagttggagggcttatattgcctgatatcagtatttaacacacaactacagtaatcaaggcagtgttgtattgatgtaaggatagagcataaatttgacaaattttgatgatgtatacattcatgtaatctatatcctagctcccaatcataatataaaatagttctattttctcagaaagtttttacttgcttttcagccaatcctcaccctccatccatagaaaaccactattatgatttctatgactgtggattttttctgtccttgaacattatataaatggaataaaatagtgaatactcttttgtccctgtttttttttttcttttttacttaaaataatgtctgagggattcattcatgttgttgagagtctcagtagggttttttgttgttgctgttaaattgctgagcagtatgaatatgatataaacataatttgtttttccactatcctctagataggcatttgggttctttgcagttttggctactatgaataaagctgctatgtaaatttatgtacaagtcatttcatgagcatatgcttttaattttcttggatacatgcctaggaattgctaaagcatgggcaaactatatgtttaaatttataaaaagtggacagttttccaaagtgattgtaccatttttttactcccactcacaaattttgagagttttatttattctacatccttgcgaatatttgttgttgtcactcttttcttttttttttttcttttgagacacagtctcgctctgttgcccagactggagtacagtggcgcaatattggctcactgcaagctccgccttctgggttcacgccatctcctgcctcagcctcccgagtagctgggactacaggtgcccaccaccacgcctggctaattttttatatttttagtagagacggggtttcaccgtgttagccaggatggtctcgatctcctgacctcatgatctgcccgcctcggcctcctaaagctctgggattacaggcatgagtcacggcaccctgccttgttgacactcttttaaaaaatgttttgtatagcaattccttgatgactaatgaggattaccatttttaatgtgcttatttgcctttcctatatcttttgtaaaaagtctttcaagttaatttctttttaattttccatttggttggtatttttcatattgatttttggaagtgttctatatattctagatatgagtcctttgtcagctacttattacaagtattttcttccaatccttggtttgcttatatattttaacgtgttttaaaataatatttcaagtattttatttaacatataaatgaagtaactggtaagaatttttttttttttgagatggagtcttgctctgtcgcccaggctggagtgcaatggcacgatcttggctcacagcaacctccgtctcccaggttcaagcgattctcctgcctcagcctcccaagtagctgggactacaggtgcacgccaccatgcccagctaatttttgtatttttagtggagacagggtttcaccatgttggccaggctggtctcgatctcctgaccttgtgatccgcccacctcggcctcccaaagtgctgtgattacaggtgtgagccaccgtgcctggccactggtaagaatttttaactggttcatatgaaattttgaattagtcattctgcaggggattggtttcagccctccttgtggattccagaatccatggatgctcaagtctattgcataaaatggtgtagtatttgtgtataacctgcatgcatccttccatatactttaaatcatatttacattacttataatacacaaaacagtgtagatgctatataaatagttgttatactatattttttaaataaaatatgtattattttatggttgtgttattttttattttaaaaatattttctatttgtagttagttgaatccactgatgtggaacctgcaaatacagaggaccaattgtgtagaggtttatattctctactgaacaaaattcgttttcattgttatgaacagagatcattttattgctaaaaattattttaaaggctttcagttttctacaggttaatcactacctctatggagttacaaaattacccagtcaatagaaagataagggtttcatgcccctgtagagtcagaaaattttaggggatctactgggcaatgcctagtactccgttaaaacaatccctagcacactctttggcctattttcaagtcttggacattttctttccagcagtacttccctctctgatcccctgtgaccataaataatctctaaagattattactttttaccttttatttttagttgacatataataattgtacctatttgtgggattgagtggtattttgatacattgtgtaattatcaaagagggtagttagcatattcaacacctcaaacatttactatttcttggtgttgtgaacgttcaaaatcctctcaatgtagctttttgaaaatatgtaatacattattattagccgtatttactgtacagtgctccagagcaccagaactcatttttttaaaatctagctgtaattttatatmttttaaacaacctctccccattctctcctcctccttacccttcccagcctctaatactcagttgtactctatacttccatgggctcaaaacagttttcttgttttcacatatgagtgagaacatgtggtatttatctctctgtgcctggcatactttgcttaacataatgttcatcaggcttacccatgttgccacacttgacaggattttattcttttttatggctgaacagtattccattgtgtatatatgccacacattgtttatccattcatccatcaatgaatatttaggttgattccatatcttagctattatgaatattaagtactgcaataaacgtggggttgcaggtatccctttgagatactgatttattttcctttgaataaatatccagaagtggaactgctggatcatatggtagttccattttcacttttttgagaaactaccatactcttttccataatgctgtataaatttacatttccaccaacggtgtatgagttccattttctatacattctcactggcatttgttattttctgtctttttgttaatagctattctaactggggtgagatgatattgagcctgaaagacacaatgttaagcaaagtatgttaggcacagagagataaataccacatatctcacttatatgtgaaaacaagaaaactattgatttgcatttccctgaaaatgatgttgagcattttttttatgtttgttggttatttgtatgttttctttcgggaaatgtctattcggttcctttgcccactttttaaagtgactttttatttttatttttttgctattgagttgtttgggttccttgtatattctggatattagtcccttgtcagatgaataatttgcaaatatttattcccattatatagattgtcttttcactttattgattgtttcctttgttgtacagaagattttcaatttagtacagtcctatttaactatttttgtttttgttgtctgtaattttaaactcttaggcataaaatctttgcctggactaatgtattgaagtgtttcttctgttttttttttttctagtagtttcatagttttgtgtttaagtgttttatctatttttagttgatttttgtacatattgaaagatagggatctagttttattcttctgcatatggatatccagttttcccagtaccatttattaaagaaaatgtcctttccccagtgtgtgttcttggcttctttgtcaaaaatcagttggctgtaaacacgtggatttatttctgggttctttattctgttccattgttctgtgtgcccattttaataccaagaccatgctattctggttcagcttttttctcttgctcagtattgctttcactattcagagtcctttgaggttccacagaaattttaggattgttctttctattatcatgaagaatgtcattgatattttgatacagattgcactgaatctgaacattgctttagacagtatggtcattttaacaatattaattcttccaatccatgagcataggatgtctttccatttgtttgtgtcctcattttttttttcatcagtgttttgtagttttcattatagtggtctttcatctgttggtgaaatttatttttaggtattttgggtagatattgtaaatgtgattgctttcttaatttatttttcacttacttattggtgtataaaaattctactgatttttacatgttgattttgtattctgcaacttcactgaatttgtttatcagttctgagagggttttggcaaaagtctctaggcttttctacatataagatcatattgtctgcaaagagggacaatttaacttcctcttttttcaatttggatgacttttatttctttatcttgcctaattgttcaggctgmcagtattggaatatattgagtaagagtggtaaagtgggcatctttgccttgttcaaattctcagaggaaaggctttcagcttttcaccatcaagtgttagctatttacttgtcttatatggctcttattatgtagacatatgttccttccatgcctaatttgttgagagtttttattatgaggagatgttgaattttgtcacattccttttctgcatctattgagctcatcatatggattttgtccatgattctgttgaagtgatgtatcacgtttatcaatttacatatgctgaaccgttcttgcatacctgagataaattccacttgatcattatgtataattcttttaatatactgttaatttgatttgctagtattttggtgaggatatttgcatctatatacattggggatattgatctgtaatttcctcttttctgttttgttcatgtctggttgtggtattatggcaatgctggcttgtagaatgagttaggaagaattctcttctcttcaattttttggaatagtatgagaattggtgtcctttaaaagtttggtagaattcagtggtaaagccatctaatcctgagcttttctttgttgggagactttctattacagattcaatcttgttactcattactaatttgttccgattttctatttctttctggttcaatattgggaagttgtatatgtccagaaatgtatccatcccttccaggtttttcaatatttagcttgtagttgtttgtaatagtttttaatgatgctttaaatttccatagtatcagttgtaatgtctccttttttatttcacttattggattctctctcttttttcttggttaatctagctagtggtctatcgattttgtctatcttttcaaaatacaacttttcattttgttaatcatttgtattgtatttttttgtctctatttcatttacttctgctctgatctttattgttttcttccttctactttcagcttggtttgttcttgcttgtctagttccttgaggtgaatttttaggttgtttgtttgaaatctttctactttctaatgtatgcatttattgctataaacttccctccttgtactactattgttataacccataagttttggtatattgtgtttacattttcatttgtgtcaagaagttttaacaatttattcttaatttctttattgacccaatggttgttcaggagcatattgtataattttcatgtatctgtacagtttccaaagttcctcttgttgttgatttctagttttattctatcgtgatttgaaaagacttgatatgctttcagttgttaaaaatttgttgagacttgctttgtaacctaacatatggtctatcttggagaatgttccatgtgctgatgagaaaaatgtgtattctgcagctgctggatgaaattttctataaatgtctttcagatccatttggtctaaagtacagtttaaatccaatgtttcttcactgatatttttgtctagatgttgaagttctcaactgttgttttagtaggatccatctctctctttagctctaagaatatttactttatatatctggatggtcttgtgttgggtgaatatgtatctttataattgttctatccttttgctgaattgatacctttgccattaaataatgaccttcttttctcttttcatgtttttgccaaatgggatatgcacattattagccctgcctcctatctgccatcttcttcaagtgtgttttgtgtgttttcatgatagtagatattcttttttgctttcaggtataggactcaaacatttcttttttttttttttttttttttaagacagaggtctggagtgcagtggcgcgatctcggctcactcactgcaagctccgcctccaaggttcatgccattctcctgcctgcctcagcctcccgagtagctgggactacaggcacccgccaccacacccggctaatttttttgtatttttagtagagacggggtttcaccgtgttagccaggatagtctctatatctcctgaccttgtgatccgcctgcctcagcctcacaaagtgctgggattactggcatcagccaccatgcctggccagacttaggcatttcttatagggttggtctagtggtaataaaaaatatggaatgctttacaaatttgcatgttatccactcacaggagctatgcaaatcacctatcattttaattttagtatatgtgctgccaaagtggtcactaaagcttattcttgaccacacacaaaaaagtcaagtcccaacagatttggccagattacttatttaggaaaacccatggtgttaattatatgtgtctcattgattttttccataaatctagagttgtgtaatatacagtaatcactaagtctaagggatttatttcatcccgaaatatttatagggcttcttggattggaatttttaaatcctttattaactgctagctgtgaactgaatatcttccacccaaaaaattataccttgaaatcctaactccacaaataatggtattaggtgaggcctttgggaggtgactgtgtcatgatttagtcctcatgaatgggattagtgcccttataagggcctaaagagaccagagttttcccttctgccatgtagtgacacagcaagatgaccatctatgagccaagaatcatgtcctcaccagacaacaaatcttctagcaccttgattttggacstctcagcctccagaactgtgagaaataaatttctgttatttataagctacctgatttatggtgtgttattatagcaatttgaatgaactaagacagtgcatttctatcttgaaactaggaagcaaagccccaaaactctctctaccagattttatctccagtatttataaattggatgaattccttttcctagcaattcccaaattttgttgyagttcctggtctgctgagtaacctttttaccatctggtagattgagaccttatgaacacaagtaccaggccaatattcttgaaaaggcttcgtaggtattgacttcacatacgaatttggaattattcctccttaatatggggtttmccatttgtaataaaagtgagtaatgcaaaatcagacacttattgaatctatgtaagtaatgaatgtttctgtgaataataaggagagtatgtaaaggtgtctgcattttcaggggtcaatgagaatcaaagttcctttaaaagttttcatttttgtttacaaaaaatctattttgggttagatatatcttaaagagaagaaatttttttctcatataaccataaaaataaaacattataaatattaccaaaatatttcaaatattacatttaaatttctctctttaatgtattcatttctataaaattaatttttattccactgcatcttgagtcagtagattgcttcatgactggaaaagaattcttgtgactctcagtccactgttatctaaaagtagtctgagtaatgtcatcttctaagtctgatttcagaactttgtcctttgaagtaaaatattagaatgataagtaaaattatctattaagattttataaatcaagctgggctcagtggctcatgcctataatcccagtaaatcaggaggctgaggtgaaaggatcacttgagaaaaaagtttgagagcagccttggcaacatagctagatccagtctctaaaaaaaaaataataacaaaaaatttagctgggcctattggcatgcacttgtagtcccaggtatttgggaggctgaggtggaaggatagcttgagcccaggagttcaagactgcggtgagccatgatcatgccactgcattccaatctgggcaacagagtgagaccccaactcaaaaaaaaattttacagatcaatttgaggaaaattgtagctataaatattgaatcttctgatacattaacatgtatatctttgtatttatttagattttctttaaaatatttttggcagtgttttgtagtctcagtagaaatatctggcatatcttttaatttttttggtatttaatgttttggatattctattagtccatttgtatactgctataaagaactgcacaagactgggtaatttataaaggaaagaggtttaattgactcacagttcagcatggctgaggaggcctttggaaacttacaatcatggcaaggcaccttcacaaggtggcagtaaggagaagtgctgagcgaagtgggaagagccccttataaaactgtgagctctcgtgagaattcactcactatcatgagaacagcatggaggaaaccgccccatgatgcaattacctccacatggtctctcccttgacatgtggggattctggggattatgggaattataattcaagatgagatttgggtgggaacacaaagcctaaacatatcagatactaacttttatttctcagagaaaagtggaaagtagataattgagaactttaggtaatatagaatagaaaacttttagctgcaccaaacctcatgaataaaaacaaaacaactttttgcagccactcgtatttctttacaccttctgtcttaatgctgctataatgaatggcaatagattgtgtggcttataaacaacacaggtttatttcccacaattctggagtctggaagtccgagatcagggtgtcagcatggctgggttatggtaagagccctcttccagaacccaacttctatttaatttctcacatggcagaaaggaacaagagaactctatgagggcacttttattacttttaatagcaaaaactgcaagtacttttgcaccaaactaatacttctgcacacaaattcggggattagcttattcataactttaatatttttaaggtgaaatttggaagaaggatattagagaaacaaactacagccccaatatctgccgttgatattggggctaaacctgatatttctctttttagtttccattctccatttcaaattcagctatcacactgttagatctcagtagtttactaactggtgtgactcgaatcttcctttcagagtggtctgaaactttggcaatcattttcagtccagggcttctccaaatgtatatttacagctacagtggggcaaaggagtatcagttggcatccaagaagatcgcctgggttccacatatatttgtcctgtccctattatgcaaaccacctctacctcccctattgttcacagttaattaccctgggcaggcaagaagagaagttaccatattgcgcagggtatttaactgtgaacaatgactgaaatgattactaataatacggaactatacaaaatatacatttggagagaaggaatccaaaatgtctagcagaagctacaacttgtagttcagttgaaccctttctttgtccactggcaagagtatggccccttactgtcaattaatgcttcatatgttttgaagttgtgttattaggtgtatacctctttagtattgtgtttttttttgataaattaactttttgtcaccatgaaatgagtaattttttgtagcactttttgtcttgatatctattttgtatattgatatagctagctactttagttttctaataactattgtttgccttagtatcttttcccttatttttaacctattagtatctataaagctaaatatgtaaaactgaatactgttcacaggagacattttaagcatgtctcatataaacagtatttagttttggaattttttcccagtagcttttaacatagttatggtatgattttggtacaagtctatcatcttactatttgttttctacttgtatcagtagatctttgatacttcaatttaaattttctacctttcactttttaaaatttttatgccaaatatcattcattcaaaagttgagattgaagtaacatattggttgttctgaagtccagagaataaaatccctttcctaggttatatgattagaatgaggtccttatcatttattgtccttagcatattgtgttgagataaggctgggcaacagctataattatattgaattcaacccccttttagcttgtaaatatttgagtctggagtgagttggctgcactttccaatacattggttattcttcggattcatcaactttaggactcaaaaatccagtcattttgagaacgcacaggatcgtgttttcagatcttcctttactgcagctcttttagcaaaatttgagggtactgttggtggagagaattatccgaccagcaatttgtttcatgcttggacgttttttatactccagttcagtcacatgatcattcaaggtaattctgacctctcttattttccaaaaagtctttccatctttagcacctctcactttaatttgccatagctaaaccagatacctgtaccaaggtatggaagaattcagtatgtacgaatgcgtttatcaaggcttctttgaagcatctaatcttccttagtcacattaaaattataacttttctttggtctaggtttttctcattgttaccacaagaaccaaggtttttttcatcttttacattttaaccagaagcaaaaaggtattatattctacccagcatttcttggtgytagagcttgaacatttttaggttatctgagttttctgtctttctgaaatagaaatggaaaccacagatttacctttacaatatggctattagagaaataatatgttagggtttaaaacatcgatgtgaattaaaattacatttgaagtttataaaaatatagatactttggtcctatagtggatgattcaaattcactcagttttgggctaaatccaaatgaaaattatgtggtttccaaatgtattttccaaaagtctctcaagttgatgttgatgcaaaccaaagtttgagaaaaatggtaaagtagatgaatggtggcctaaacattcacaatatttatctattctttatccccactgtccagcacagtgatggcaagtgctcaatttgtacaaatggatgaatgcatttattatgggcaattggtttttcatgtaaatcagcatgagataatttagacattttagatgttctttcaataaacaaaactatagtcatattagaagactgaatcaatttacttcttctgatgagtttatcaatgtgctccttgttgcttaatcctttggacacctccttacatattatatttgacctcgctgtagaaatgatgctatcctttytcttcctaaaacaatttttcccttgcctttgtttacatcataattttcttgtttctccctaactagtggccacttaatttgaatttttaattctttttcttcccctgttaaaatatgaaacttctaatctgcatttgaaactcatcatagttgtttcagtaatctcaagaggtgatgtggtttggccacgtccccacccaaattttatcttgaattgtagttcccataatccccacctgttgtgggagggacacagtgggaggtaattgaattgtggggatggttacccccatgctgctcttcttgtgatagtgagtgagtcctcacgagacctgatgtttttttaaggggcttttccccccttgcttggcacttttccttcctgctgccatgtgaagaaggacatgtttgcttccccttttgccataattgtaagtttcctgaggcctcccagcctcactgaactgtgagtcaacctctttcctttatacgttacccagtctcaggtatgttcttattagcagcatgagaacagactaatacaagaggggtgcagtaaaattcttgcagtgaaagaattcactataaattaatcataattcccctctctttctctctctctccgtgtatgtattgtctatcaacagtaaacatttattaaggttttttttctgtgctacttgctgggagtacaaagaaccttaagataccatctctgcccttaaggagcttataaatcaaataaataagggtattttataattctgaaagaattctgagaatgctgcccttagctatgaatacaatttccttcctccctgaagcttttatacattctcctcttcaccctctatttttattttcttgaaaatttgttttaaggacttagctgtcttcacatatgggaatatgtgattggagagaggtgaaagagaagtgaggaggaaaagtcagrgaagaaagaagggtctcaaggcacayggctttctgattctttactgtaaataacataaatgcaattaaaatacattacagtgcccgggyktggtggctcaagctgtaatcccagcactttggtaggccaaggcgggtggattgccttaggtcaggagttcaagaccagcctggccaacatggcaaaaccctgtctctactaaaaatacaaaaattagctgggtgtggtggcgcatgtctgtaatcccagctacccaggaggctgaggcaggagaatcacttgaatccaggaggctggggtcgcagtgagctgagatcataccactgcactccagcctgggtgacagagcaagactctgtctcaaaaacaacaacaacaacaacaacaacaacaacaacaacaaaattatagtattttaactttctaaagggttcrtagaatttcatccaattttatttttgcaacattccattttactgtggaaaaactgggtcagggtgtgcctatgtgtttaccagacacctccatccttcaggttttaaagcacatttcttttacttaatacattattaatttgatcctagcaacaatcctctgagtcttttgcttatgaaacaggaaggaggagtagaatcaagcgtgtttgaaaggcagaaaaaacaccctgctaagtttgaatccttgtttatttacttgctagctgtgcgacttccatttaacttccatgagctcatttttctgttaaatatgaataacagttcctattagtagagttttgtgcctagcctgttatattctaagtgttggttcattttctccttcctctgaattggatcagttcttccaaacacagagattttttttcatgtaaagaggtacttttcctaaacaaagacaatatttttggttctgtaattgacctgcagattgggctggccctgcgtttaggaaggtggatgctaactacatcttcctttgcactagactggtgtggctgtgttcctttctttcacctgacacaaagtcttagggaacatattatcctgtgcaaaattgatttctaaataatacatcaaaacatcctagtaatctcctgaaaacagaaaaaagggacctgaaatttattatatggtgtgtgcttagctgcacaatttctaatctggtaaaagttcaaatgtaacaattagtgtcacacttcaccttattcagagtggtctaaagcttatctgccatgggtaataataatcaggatccaataaaagatgttggagcagatggaggtactacagtttccaattaaactcctctttattaaactttgtattctctcatgatttagtgaacttacttcagctctgtcacctatacaactggcatttgtgtttagcactgctctgtaagtttgcttactttctaaggtagaaaaaggctttatgtaaatggtgagtctcatcttttcttaatcaaatagttgcagatgatattttgttttgcagcaacaaaaagagaaagagaaaaaggcaattgatatttattgagcattgggaatatctggcaggcatttttgagtgaatctactcttgagtaatttgctgcatttaatcctcttaactatactatgaggaagaggttgtttcttatttattgaccactttgttgatgagaaaacggaaacttggtgtttgaatcagtgagcagatgtgaaaaaaacagaaagacctttctagctgttcataaaatcatattgccaagggaaaggtaggagagattttataaatgagaatgtagagaaccttattaataagaacatcttgttttattacaaggaaaaataatatgtcttacgtatatatgagtcaaaagaactcatatttttaaaactctaggagactcttttacatgtaaatattatcaccacgtgaagtgtttaacaaacctgtgtggacatcacacagtcagatgctgtgtttggcactgaggcttagtggtggtgtgttcggaattggttccttctggtgggttcttggtctcgctgacttcgagaatgaaaccgtggaccctcgcagggagtgttacagttcttaaagatggtgtgtccagagtttgttcctccagatgttcagctatttctggagtttcttccttccggtgggttcgtggtctcgcttgacttcaggagtgaagccgcagacctttgcagagagtgttacagctcttaaaggtggtgcgtcaggagttgtttgttcctcctggtgggtttgtggtctcgctgacttcaggagtgaagccgcagaccttcgcartgagtgttacagctcataaaggtagtgcagacccaaagagtgagcagcagcaagatttattgtgaagagcgaaagaacaaagcttccaaagtgtggaatgcgaccccagctggttgctgctgctggctcaggtggccagcttttattcccttattggccccacccgcatcctgctgattggtccattttacagagtgctgattgctccgttttacagagtgctgattgatcggttttcacagagtgctgattggtgcatttacaaaccttcagctagacacagagtgctgattggtgcatttttatagagtactgactggtgcatttacaaacctttaactagacacagagcgcttgttggtgtgtttacaatcctttagctagacagaaaagctctccaagtctccacccaacccagaagcccagccggcttcacctctcagtgagaaacagaggctacatgtctgttttcatagaaagattaaatacagatatttatgagatttcagttaatgcttacctattgttcattgagagaatgagagtttagtttacttgattagtctgaggcaattaacaaggcagaaaggatccactagtatgggaagcacaaagaagtcttaagaagcaagtgacaaaaaagctgatgtatttccctaaataagtcctagaccctgaaaaggaatatgggatgaaagatggaagggccaggtgctttcagtgtctcaagaagaagagcatggtttaaaagcacttaggatttctyggaaagtagaatttctttctatgtcactgtatttgctccctccaaattactgttcttggacttttactgaggcagtccagctactcaataagtaacacctgctaacaaaatatttctgttttcctcacaagcaaggggcaattaactgtcttaagcatagtatatgctaacaaaacatttctgttttcctcatgagcaaggggtgattaactgtcttaaacatagtatatttgatatgtcattctacatataaagattcaacaattgtgtgttgggacatgaattctccacatagggtaatttgagttaaaccagtaacagctttatagtcgatagcttaagtgcaatgttaatgtctattgtttccagaatttaaaaaataggtttcaagatacagtaaaagatgtagaacccatgaagtaaggcaagcatttataatttagtatagaaaccaatggacagtctaacaaaaggatatcaaatgcaagcaggaaaggagtaataaaggaaaaataaaaccagagatttttcagtatttttcaaaaaaaataaacaaatattcaaaacattattagactgttgaattcatctaacacgtaggaatgttgaaatggttcaaatatcacaaaaatgatcaatragttggagaaaaggacttatagggaaactttaattagaaatataattagggaagacctttgttaccacatgactcataacacagatttgaatataacatagttacatgactcctcaaatgaaactttataataaaattataaactgctctgggtagatcataaaatgtgtgtgtgtgtgattactgatctatatatgaggatttactcattgaatagagtattattaggataagttaatatgctgtcaaaaaagggctttgcaaaattatagtaataaaataaactttctgtttataaaatagtcaaatgacagacgggatcacagagatggttattatgatgtcatgtgtgtgatgaaattatttcagttttgactctagactattaaggaaataaggccgggcacgattgctcatgcctgtaatcccaggactttgggaggccaaggagggtgaatcacctgatgtcaggagtttgagaccagcctggccaayatggtgaaaccctgactaggtaaaaatacaaaaattagctgggygtggtggcaggtgcctgtaatcccagctagtcagaaggctgagtcaggagaatcacttgaacccaggaggcagaggttgcagtgagctgagattgtgctactgcactccagcctgagcgacaagaacgaaactcagtctcaattaaaataataataataataataataataataataataataataatataagatgacatcttgtctcacagaaacctgaaatttttagtttttaggttgttgagaagtgccatgttttaattcaatcrcctatattctaatccaggcatttcaaatgcacattctattatgctatcttgactatcttacataattgttttagacaccccccccccttatctatttgcacaattctgtggagtaaggaccaggatttaaatgttaatctattgaataggtaaaaatgtgctgttctctgttaccgctattaaaagaatccatgaattgtgaaaggttttatctctgcagtataactctccatttagaaatgactcacatatttatttctttggctctgatcatccaaactaaagtattagccataaaaaatgttttaggaaygtagaaatttaatattatgaatatatgtgagtttattgagagacactgtaacagtgagtatgtaatataattttatgtataattttaagactgccattgtaattgtacatatttatgggatacaattaatgtttatatacatatgtatgttatataatgaaaaaacccaagtagttagcatgtctatcacctcatatatttattatttctttgtggtgagaacattcaaaagcttttcttctagctgttttgtaatatacaataccttatggttagccatagtctccctactgtgcaatagaacactagaacttattccttctcattgtgactttgtaccctcttgtcatctttctcttccccctttcctcctcagtctctggtaaccactgttctacttcctgcatctatgataycaactttttttttttccagattccacatatgagtgagaccatgcagtatttgcttttctatgcctagcatatttcacttaacatgatgtcctccaggttcatccatgtagtcaaaaaaatgacagaatttcattctttttatggctaaatagtattccaatgtgtatatataccaaatttttttcatttctttatttcatttattgttgtatagttaggttgattccttatcttggctactgtaaatagtgctgcaataaacatgggagtacagatatatttttgacatgatttcatttcctttggatatgtagtgaaaccagtagtgaaattactggataatatggtagttctatttttaatttttttgagaaagctccatactgttttccatagttgctgtactaatttacagttccacaagcagtgtgtaaaagtgtttccttttctccagatcattgccaacacttttttttgtcttttttaaaatagctattctaactggagtgaagtggttatctcattgtggttttaatgcgaatttccctgatgattagtgatgctgagcattttttcatatgcctgttagccatttgtatgtcttcttttgagaaatatctagtaacgtcttttgtccacttttaaactatgtcgtgtgtgtgtgtgtgtgtgttgtgtgtgtgtgtgtgtgtttcctgttaagttgcttatatattctggatattaacaacttgtgagatgtataatttgcaatttttttttccctttgtagagattgactcttcactctgttaattgtttcttttgcggtgtaaaatcttttcagtttgctttaatcctaattatttgtttttgcttgtgtcacctgtgctttttaggttttatttaaaatctttttttataaggcacttcctctatgtttttgtctagtagttccatagttttgggttttatgtttaagcctttctatccatttygagttgacttttgtatatggtgagaggtaggggtctagtctcattttttgcatgtagatatccaattttcccagcaccatttattaaagagacttttttcccaatgtgtgttctcacacatttattgaaaaccagttgtccgtaggtgcacaatttttttcctgggctctctattctgctccattggtctatgtctgtttttatgctaggaccctacagttttggttcctatatttataaattaggtagtgtgatgcgtccagctttgttctttttgctcaagattgcttcggctgttcgtgatcttttgtgattccacatgaattttaggattgctttttttatttctgtgaagaatgtcattgatattttgatagagaatgcattaaatctgcagatcactttgggtagtatggttattttaagaatattaattcttccaaaccatgaatgttgtcatatgtttttgtactttcaattttttcatcaaagttttgtagttttcagtgtatgtaactttcaccttaagtttattcctagatatcttttttatggtagctattataaatggaatccttttcttatttctttttcagatgttagtgcatagaaatgctactgattttcatttattttatttttttttgagatggagtcttgctctgtctcctagcctggagtgcagtggtgcgatctcggctcactgcaagctccrcctcccgggttcacgccattctcctgcctcagcctccagagtagctgggactacaggcgcctgccaccaygcccggctaattttttgtatttttagtaaagactgggtttcaccgtgttagccaggatggtctcaatctcctatcctcgtgatccgttcgccttgcctcccaaagtgctgggattacaggcgtgagccaccaggcacagcccgaaatgctactgatttttgtatgttgatttttttaaactgcaactttactaaattcattttttagctctaacagttttttggtgaagtctttgtggttttctatttataagatcatgtctgcgaacagggacaatttgacttccttctgttcaattgartatcttttatttctttctcatgtctgattgctcaggctagaacatccagttctatatcgaatagacatggtgaaagtgggcattcttgtcttgctcctgttcttagagaacaaactttttagcttttcctggttcagtatgatgttagctatgggtatgccatatatggcctttattgtgttgggatgtwtatcttctgcaccaaatttgtcaagagttgtgttttttatatcatgaagagctgctgaattttatcaaagrcattttctgcatctattgaaatgatcatatggttttttatttttttctgttaatgcaatatataacatttattgatttgcatttattaaaccatgtttgtgttcttgatattgaatgccacctgattatagtgaatgatctttttaatgtgtggttgaattcagtttgctattatcttgttgaaaatttttttgtctatgtttatcagtaatattgtcttgtagttttcttttttggctgtgtcattgtctggtttgagagtcagggtaatgttctcctcataatgtaagtttggaagtatttcttcctctttgatttttctggaatagtttgatgaaaattgttactagttctttaaatgtttggtagaattaagcagtgaagtcatcatatcctgggcttttctttgatggaagactttttattactgactcaatttcctcattcattattggtctgttcagattttctattattttataatttaatcttggtaggttctatgtgcccaagaatttatccatttcttgtatgttatcaaatttgttggagtatagtttttgtaatagtcttttatggtcctttgtatttatgtgctatcagttgtaatgtctactttttaatatctgattttatttgtcttttctcttttgttcttagttggtttagctaagggtttgccrgttttgtttattttttcaagaaaaaacttgtttcatcaatcttatgaattcttttagtctctaattcatttatttctgctctgagctttattatttcttcctttccatgaattttgtatttgtttttgttttctttttttctaattccttgagatgcactgttaggttkttcattagaaatctttcttcttttttgatgtaggtgttttattgctatcaacttcgctcttagaactgcttttgctgtgtcccataggtttyggtataatgttttaacttccacttttaatttacatattgacccactggttgtttaggagcatgttgtttaattctcatgtatttgtaaagtttttgaaatttgtttattcttgatttctatttttattccattgtggtcagaaaaatacttgatacgatttcagtgttcttatatttgttcagatttattttgtgctttaacatatgttctatcctgggtaatattccatctgcagttgagaagaatgtgtattctgcagatgttggatagaatgtctcttaggtccattgagtctatggtccctttgatctatggtccatttggtccatttggtctatggaaaagttcaagtctgatacttctttcttgattttctctctagatgatctgtccattgaagtggggtgttgaagtcccccactattgttgtaytgcagtctgtcttcccctttaaatctattaatgcttgccttatatacctgggagctttggtgttgggtgcatagatatttatagttgctatgtcttcttactgaattgactcctttatcattatttagtgaccttctttatctttgttcatagtttttaatttgtagcctgttttgtcagatgtaagtagctactcctgcttgcttttggtttctatttacatgaaatacccttctccattcctttacttttagtctttgttagtctttaatggtgaggtgggtctcctgtagccactatatagttgggtatgtttttttaatatttatccagtcactttatatcttttaattgaataattcatttacattcaaggtttttgttgataaataaggacctactcctgtccttttgttaattgttttctagattagaaaacattttttctaaaactgtttataaacagtttgattatgatgtgcctcagagaggatctttttggattgaatctgattggagacctwagtttccaggagaatacagatgtggatccaatgtcaagtttttgttaattgttgttttgtagattctttgctcctctctttttatttatctgtgtggtttgtggttttctttggtgctaagctttgtttactttctcttttttgtttatctgctgtaatttctttccttgtaatttatttttatttttatttttttattattatactttaagttttagggtacatgtgcacaatgtgcaggttagttacatatgtatacatgtgccatgctggtgtgctgcacccattaattcgtcatttagcattaggtatatctcctaatgctatccctcccccctccccccaccccacaacagtccccagagtgtgatgttccccttcctgtgtccatgtgttctcattgttcagttcccatctatgagtgagaacatgctgtgtttggttttttgtccttgcaatagtttactgagaatgatggtttccaatttcatccacgtccctacaaaggacatgtactcatcattttttatggctgcatagcattcccatggtgtatatgtgccacattttcttaatcaagtctatcattgttggacatttgggttggttccaagtctttgttattgtgaataatgctgcaataaacatacgtgtgcatgtgtctttatagcagcatgatttctagtcctttgggtatatacccagtaatgggatgggtgggtcaaatggtatttctagttctagatccctgaggaatygccacactgacttccacaatggttgaactagtttacagtcccaccaacagtgtaaaagtgttcctatttctccacatcctctccagcacctgttgtttcctgactttttaatgattgccattctaactggtgtgagatggtatctcattgtggatggaactaacataaagagtcttttagctataatagttataatataaagttaagataataacaactttggtcacatcaaaatctcctagactcttctcctccccctgacaatttatacttttgttgccttattttacatctttatctattgtgtattcctgaaccactaattggagctgttgttgtttctgaccattttgattttgaaccttcatactagaggactgaaagatgtatgtagcaccattacagctctgggatattctgagtttgattataratgtacgtgttttcatgatgaaaattattgtttttccatttccagttgtagcacttccttagacatttcttgtaaggctagtttagtggtgattaattccctcagcttttgtttatctggaaaggtcttcatttctttatttctgaataatagcattggtgaatatagtattcctgtctaacagttttttaattttattttcagcacttcaaatatattattccattcacttttgacttgcaaggtttctgctgaggtatctgctgatagtctaatgggaattcctttatatgtgacttgatgcttttctcttgcagcttttagaattctctttgtttttcactttggacagtttgattataaagtgcctcagagaggatctttgtggattgaatctaattggtaacctctgagcttccaggagaatacagatatggtccaaaatctctcctaagacttgggaaatttccagctactattttgttaaatagattttctgtgcctttctccatcttttytctctctggtacttctacaatgcaacaatttgtttaattatgtcccataaatcccaccggcaatgttcattcttttttattcttattttcccccccactctgactgggttatttcaaaggactgtattcaagtatagaaattttatcttctgtttgatttagttggttggttgaagctttcaattgtattttttgtttgaattmttcagctttaagatttctttttagctcttttttatgatatctatttgttaaatttcttattcaaatcaataatagtttttctaatttcattgaattgtttgtattttccagtatctcactgagtttccttcataacattattttgaaatacttttcaggtattttgtacatatccttttctttggggtcagctactagagacttactgtgttcctttcatggtgttagatttccttgctttttyatgtttcctgtttccctatgttgatatctgcacatctagtggaacagttgctttttctaaatttatggaataggttttgtaargagagactttttcctgtagattcgtcctaggacatcagttgggtgtggtgcattgcctttagttctagggggctcagtagcatggtctttgtgcagtttctttagctgtaatcctcgtcagttatatctgtgattgccttaktggactaggctgtgggagttgcaatggcagttgtgatggcaatggtgtggtttttctgaaagtggaagagctgggatggtggtcaggcctggtacgtgtaggtgcrggaggctgggtagctgtgtggtggtctctttgtggaggtaggcctgctgctagactggccattgagccagttgcagtttcacatgaacacagtagtttgtttggttgtacagtggtttctctgaggaggcagtgctgcctccggcctggttggtggggatggggcattgcatgggtttgaacattgtggtctcagttgttccaccatggctaggcttcatgtaggtgggatcatagtgctgcaggcaacagtgttcacatagtggaatggcagtaggtccttagggatagagagagtggccactcaaccccatggcagatgcattctagcagtagatccattttcaagatggtgctgtgccatagcagcttaggtcatgggggttgaaggggtctcctattctgagaccaccctgattctgggaggtatgcaaattcccagaaactctccaaactggattcagggcctgtgaagactacgggggctgtactgtagcaaggatcattggcatctgtggtgacaatggagaccacttgggrtccccagcttacttttatcttataagaagaaatatctcctgattcaaagcctatcctggtgagggagacagtctggcaggggcagggtgtcttgctcccttctctatggtgctatcttgggtttccatgatccacagagattttgccattttccttcagcatactttctcaattgctccagttgaaatataattgtttattcactgtttgattcctttttgtttagggggtgcagcaaattccagaccactctagtcagttaccttgctgatgttattcgtgtttatactttaaaaatgtattaatatgtatatattttggtatgtatgtatatgtgtgtgtgtgtgtttgtgtgtggcatatatccacatttaatttctcagttaactttaggcatctatctaccacagaaagacattaagaatgccaggtgaaatcaaagagaaagtgaatgaatattcagcytctgatcgtacaaatagaagtttacagaagacaactgtcttaaaagccaggcattgttaaacaggattttctagattcttttatctagatctcatgactgagaccaagtttcattggcctcactcatgttatgcctcatgaagggaagagaaagagaaagagatggagagagcgagagagagagagagaaagaaagagagagagacagagacagagacagaaaaactaagaataaatgaatgagaatatgcttcttgcagtcctggtagttggtgggtaaaggatggcaaaggagaggacagagagaagggtctgcagatcatgaagaagggctttattatctgtctaaaattgcaaacagaaattgacatggttatgagagggcctgagtccattcaggctgatcatggtttcctgagtgtcttcaagcctcagttgggagtctagcccacagatactgctaacatggcaagtggtaattatgcatatctttgctgtaaagmaggtagatagatggtctttagggcattctggaatcacagactttcctgtatatcccagtgaagtaatgaagaggtgttaaaattgcccctgggtagcggagacttggagtcaagacaaagttgccaccatagactttgagactgggtgaagatgttggtactatgagttctagcagggttcccaacatgtcatcccaaaagcctagtggagcctgttgcctcttggcagtcaccaatctggggttcatatattctgcacaagagacaatagagatccaatacctcatggatctgaggaacattcacctcatgtctccttcacccacttctgtaaggacaaggtcaacccctctcatgcatataaacttgagaaaagtaaagagaaagagtgaaatctgaaagactgagcacttacctataaaatagtacattatgtgaaagaggtaaatttgaaacagccttaataggatgtttaactttgaagagactgaaaagggattgttgaaaccagaggagttggaaatattttaattggtaagttaaaaaaaaaataacttctgctcagcatggttggaaattgtgaaaaagataaatgcagttttagaaatttaagaaacttttcttggtgccaccgacttatattggaattaaatgttcgaagtcagatcctagcataaacctagagtttagaaaaataattgagtgaaagaattaaatttttggtgtttctcttatgctgttagggaaaagtaataacactcaattgacacaaatatcctgaagagtggaagaaaatacttcattttgaattaatacaaatttttaatgatatttcaccacttcttggataaaataaactccagactagtcaactttgatatagtagaatgagacttgaaatacaaagtctagtttgaggwacttagcattatttaccgtaccacttcyggtaaagcacttaattcctcctaatctcagtttctttacctataaaataggtcacatctacctctggtaactgtgataaatctcatatattattgcacacctgaatgtggagtagaccaagggcaaatctgacatgctgcctgtttttgtatatacagttttttkggggggaaaaagagccttgcctacttatttattcaccttttctacagtgacatcacactgcaaaggcagagttgaatatctgtgatacagactgtggcctgtgctgttaaaaatatttacaacatgaagctttacagagaaaaatttgccagctctggtgtaaagtatcataagcaataaaatgagcaggtgctattatttttatcatgttataccccatttgctgattccatgctgacatagctgtgttttagcaaacaattttgtttaaaaaccatcttctttctaggcaggggttattctgggtaatagagaagactagcttttcattcaaaagcatgcttctcattgcaaaataaccaactgggatcagatttataaagcagcctactcagaatttggcttctttttccttggcaaaggcctgatctccttggttgagttgatatggttaaacttggaaatctaaaatttaagtaccacctgttctgaattctccttgagccattcytcacacaccattggtattgacatcaaggggccagctactctccctcaactttaccatacttcccagaggagtgtcagccaaacattttcagttgcctacgtgcacatgaaattggaagacaaactacttttaagaaggacacagatacctactttgataaattttccttttctttgttccaaagtctatcctcatgtggactgacaacaaagctgtcacctgctgcagggtgaaatcgagtgagaataacagacggctattatgtgaaagggaaccttgggtgaatttggcaagatgctaggttatgaaaaaataataatttcaaacactagtttattattaaatgaagtcagattttaacaatttcttgttatagggtatccagcaatgggaatgtaacatacttgggttaattatgtcattctttagggaaaaaaagttagttaacagctagccacctgccatgtattaaaaaataagaggctgtagattcctttctggaaatagaacatatttgaaatgtagatgctgtaattttgccaaaggctgatgaaaccccaaaaggtaattatgtcagcctgagaagactataatagtgaaaataagatttacaaaaagagttacaggttttccgccaccatcagcagacaattttaaatttggaagtgaatgctattgtgcttgggcatcgcttaaatcttttcctccccaccaaatgtttctctaatttgcctgaaaawcttccagttttctctcttcctcttttctctatttccattattttctttctctcccacctcctctcaggttctcacccttcccacaacaactaatgctcttaacataacttagaatagtatagaaagctgtactcttttaacagggaatggaaagcaaaacatttttgtaggatgtcaccattgctttttattacatattagaaagttttgaacagcccctgtaagtccagtttaaggaatctgtcctatagatatacttccaagtatgcaaagctatgttatgaaggtcttcattgcagactgaggatggaaaaaaagaaaagaaaaagaagtgaagcagagaatagaaacaatagaaacagtggggaaaaaacaggagaggagaagacaggaggaagaccaggagctgggagtggcactaaaagaaagctccagaartgtggcgtgagagaagagctagcaacaaaggcttccctttcttggtccacagaggactctacatgaactatacacattttttaaagctcagtatcctaactgtagagaatcccatattaktttgctggtgaggcattagggacttggaaatgagcccaaaatgttctggagaaatacttggtataactgaggatacttttcattgacactgtattaatgaaaggtgccagagagaaagaagacagcattaggctgccaaaggtatttattgtaataaacttggtggggcaggtcatgtggcaccatgagccctcaattatttagcctgcaggaagagaaaaataagttaggaataggcagtaccaggactagggaaacgtaatcagtgggagagttggcctccaagtaaggtggcaggaacctgattcagggtccaagttgatggagcaaatctttctctatctgggctttagttgayatcccaagattcaaattaggtggttgggccccagcagctgtagttttccagtagcagtgctactcagaaacaggtggatgggaattgtgtggtttctggagtgtggaaatccatctggattgaagtaggattctagccagttgctggcaaaagggagagaaggtccaactcttaggaaaattgggactgtttcagaaccttgttgtgattgttggagctcagaaacaagatccaatccgagtcagaaaactggaatataaatcaggacctgaggcagtttcccagtcccatgaaagcagagtaggaggttggataaggaaagcatagctcagcaagcacaaaggcatcttgaaactcacacctgttatggagtggagagttattccagactctaatgcacattcaacaggcaggtttgttcatttggttcaggcatgaaaagggcaatgtgagaagcaatgaagacaataagaaatgacgctcatggtaaaatcgtaagaaatgttttgcatggtgctaacagttcaaaagatcctggaagcacaagttagaaagataattttctgaagggtgagtaaaacatttcagggctgattacttcaatctttaatctattaatttgctcttcaaaaagttagtggtgttctattgacctgaagaatagactgctcaacattactgacttcaatttcacaagcaaaatgtaaatgagtaaaaagcaagctaattattcaatttaaatagaaagcaagtgtctaggatatctttgggttcatactccttactttctgtatcccacatcaggagcagatgtggcatgtatagttgatgtcataataactgtgagtaattgataatatgtgaaatttggtaatactgtacttaaggcagagaaaagaatttgctatttaataagtacctttaagagtttatgctaacatcttaaatatttttgaaaatttagtttatacacattttaatcyttaagcctatattatatatgagatttcactcatgttttccaacagtggaattctatgtggtaactcaattataataatattttcttagaggtgccaaaaactatttagcagatgtaacatgctttcatccataatatatatgtgagtatgaatatttatacccagatttatccattgtatgattatactgaaaagaatagatttaatgcacatcatgataattatcattagtgggtgtttactgtttgttagacactgtactaagtgattttacaaactttaactcattwaataataaaaaaattctacatagcaaatattcttaccctgatttcgtagaggaggaaactgagagttagcatcctaaagctaaaaagtggtgaaattgcatatggctccagaattagaagatactgaaactggaattcagacaaaagtctatattgatgagtgttgttgctgttaatttctatgctacattacttgcacgaattaacttacttgattcactaatgaagtcaaagttgtacagtcaatttatacataagccaattagctttgcataaagaaaagacactacttcattgtcaccatacctgaccactgcttgaaatatctgtgcctctaatttcagtacatttgggcaagactgagcagccattttaataccaaacgtgtgtatgaataactctttaaattccacattttgatgctatggtatctaatataaaggataataatttattaaatttcttaacagtttttaactttaattcaatagcagatggwataatagaaaaaatatgttactgtaggcaatgccatttacttctctactttagtttgcccatctatataataaggactggattgggtatttttcagattccgtttatccttgaaactatattattctaaacatctaattaattgctagtcaaattacatttgctagaaataatacaagacagaggaaactagcatttattgagctgttttatatacctgaagtgtgaatacacgcatgcacacacacacacactcaaatttattcatttagttcyctgacttaatttgcatgataatattgcatagcatgtgatattgtatgcattctacagaaaaagcatagtgacttagaagtcacaaagctttccaaagatctcaatcataaagtacaaatctgcatgcccttttgcttaatgactaatcttcagcttatttggaaaagtaacttgtttagaacacactgtgtattagttaggtagcaaattaagatgtgaaataacagaaacttatcatagaaatgtttatttcttactaatgtgactttagcattgggtctttaatggtcttagaagaaaggtggagaacatatacccccttttacttctgactgtaagttacatctatcagtttcattcacattttcrcaagacagacagattacacagctgtgaccttagcaagggaaatttggaaacggagtcttgtgttttcaggcagagcaaaatgaaactggattttataaacaaacccattgcactggttctgccgaagccttatctccatcactgataatgatgcagatatttgaagggctgctatgttaactttttaactatgcttatagacacagaaagaataaataacacagagcttatgtcttcttgatagtagtatcctttatttagaaatttccagaaaactggaatctaatgagattccagagctttcttcttgatatggagttccacaatggctttactgtttcttatgttcaccatttcacctccagtgttcattgcagtgtatgtatgtgcatatgtatttgttgcatgaatgttagaatgtgcttatagtgacagcaggtgactagtgggtgaagttgctaatattttagcacctaattgaaaagcctctaaatgaaastaaatatttagaaagacatcgctggaatttggaaacattgcaacagtgtaagccttgtggtcaactaccttctctcaatttatctatattcaaaaagaaggaaatctttgtccacaatggtttaagctgtttctggccaaagggctgacctttttgctgaaacagatttcacaaatgtggacaaactcaggcaatgactaccagagccctttagaagagaaggcttagcaggagcacttttagtctttgtgtattcttgactcaagtgccctttgttgcttgccagggaactcagggaggcagagatgacattttgatgatgtggcataacctagacctgtggttctcaacctttccaagtacaaggtttctttttttttttatttatttttatttttttttatttttaagcttttttttttattatactttaagttttcgggtacatgtgcacattgtgcaggttagttacatatgtatacatgtgccatgctggtgcgctgtacccactaactcgtcatttagcattaggtggtannnnnnnnnnnnnnnnnnnnnnnnnnnnnnnnnnnnnnnnnnnnnnnnnnnnnnnnnnnnnnnnnnnnnnnnnnnnnnnnnnnnnnnnnnnnnnnnnnnnnnnnnnnnnnnnnnnnnnnnnnnnnnnnnnnnnnnnnnnnnnnnnnnnnnnnnnnnnnnnnnnnnnnnnnnnnnnnnnnnnnnnnnnnnnnnnnnnnnnnnnnnnnnnnnnnnnnnnnnnnnnnnnnnnnnnnnnnnnnnnnnnnnnnnnnnnnnnnnnnnnnnnnnnnnnnnnnnnnnnnnnnnnnnnnnnnnnnnnnnnnnnnnnnnnnnnnnnnnnnnnnnnnnnnnnnnnnnnnnnnnnnnnnnnnnnnnnnnnnnnnnnnnnnnnnnnnnnnnnnnnnnnnnnnnnnnnnnnnnnnnnnnnnnnnnnnnnnnnnnnnnnnnnnnnnnnnnnnnnnnnnnnnnnnnnnnnnnnnnnnnnnnnnnnnnnnnnnnnnnnnnnnnnnnnnnnnnnnnnnnnnnnnnnnnnnnnnnnnnnnnnnnnnnnnnnnnnnnnnnnnnnnnnnnnnnnnnnnnnnnnnnnnnnnnnnnnnnnnnnnnnnnnnnnnnnnnnnnnnnnnnnnnnnnnnnnnnnnnnnnnnnnnnnnnnnnnnnnnnnnnnnnnnnnnnnnnnnnnnnnnnnnnnnnnnnnnnnnnnnnnnnnnnnnnnnnnnnnnnnnnnnnnnnnnnnnnnnnnnnnnnnnnnnnnnnnnnnnnnnnnnnnnnnnnnnnnnnnnnnnnnnnnnnnnnnnnnnnnnnnnnnnnnnnnnnnnnnnnnnnnnnnnnnnnnnnnnnnnnnnnnnnnnnnnnnnnnnnnnnnnnnnnnnnnnnnnnnnnnnnnnnnnnnnnnnnnnnnnnnnnnnnnnnnnnnnnnnnnnnnnnnnnnnnnnnnnnnnnnnnnnnnnnnnnnnnnnnnnnnnnnnnnnnnnnnnnnnnnnnnnnnnnnnnnnnnnnnnnnnnnnnnnnnnnnnnnnnnnnnnnnnnnnnnnnnnnnnnnnnnnnnnnnnnnnnnnnnnnnnnnnnnnnnnnnnnnnnnnnnnnnnnnnnnnnnnnnnnnnnnnnnnnnnnnnnnnnnnnnnnnnnnnnnnnnnnnnnnnnnnnnnnnnnnnnnnnnnnnnnnnnnnnnnnnnnnnnnnnnnnnnnnnnnnnnnnnnnnnnnnnnnnnnnnnnnnnnnnnnnnnnnnnnnnnnnnnnnnnnnnnnnnnnnnnnnnnnnnnnnnnnnnnnnnnnnnnnnnnnnnnnnnnnnnnnnnnnnnnnnnnnnnnnnnnnnnnnnnnnnnnnnnnnnnnnnnnnnnnnnnnnnnnnnnnnnnnnnnnnnnnnnnnnnnnnnnnnnnnnnnnnnnnnnnnnnnnnnnnnnnnnnnnnnnnnnnnnnnnnnnnnnnnnnnnnnnnnnnnnnnnnnnnnnnnnnnnnnnnnnnnnnnnnnnnnnnnnnnnnnnnnnnnnnnnnnnnnnnnnnnnnnnnnnnnnnnnnnnnnnnnnnnnnnnnnnnnnnnnnnnnnnnnnnnnnnnnnnnnnnnnnnnnnnnnnnnnnnnnnnnnnnnnnnnnnnnnnnnnnnnnnnnnnnnnnnnnnnnnnnnnnnnnnnnnnnnnnnnnnnnnnnnnnnnnnnnnnnnnnnnnnnnnnnnnnnnnnnnnnnnnnnnnnnnnnnnnnnnnnnnnnnnnnnnnnnnnnnnnnnnnnnnnnnnnnnnnnnnnnnnnnnnnnnnnnnnnnnnnnnnnnnnnnnnnnnnnnnnnnnnnnnnnnnnnnnnnnnnnnnnnnnnnnnnnnnnnnnnnnnnnnnnnnnnnnnnnnnnnnnnnnnnnnnnnnnnnnnnnnnnnnnnnnnnnnnnnnnnnnnnnnnnnnnnnnnnnnnnnnnnnnnnnnnnnnnnnnnnnnnnnnnnnnnnnnnnnnnnnnnnnnnnnnnnnnnnnnnnnnnnnnnnnnnnnnnnnnnnnnnnnnnnnnnnnnnnnnnnnnnnnnnnnnnnnnnnnnnnnnnnnnnnnnnnnnnnnnnnnnnnnnnnnnnnnnnnnnnnnnnnnnnnnnnnnnnnnnnnnnnnnnnnnnnnnnnnnnnnnnnnnnnnnnnnnnnnnnnnnnnnnnnnnnnnnnnnnnnnnnnnnnnnnnnnnnnnnnnnnnnnnnnnnnnnnnnnnnnnnnnnnnnnnnnnnnnnnnnnnnnnnnnnnnnnnnnnnnnnnnnnnnnnnnnnnnnnnnnnnnnnnnnnttttggtaccagtaccatgctgttttggttactgtagccttgtagtatagtttgaagtcaggtagtgtgatgcctccagctttgttcttttggctgaggattgacttggtgatgcgggctcttttttggttccatatgaactttaaagtagttttttccaattctgtgaagaaagtcattggtagcttgatggggatggcattgaatctgtaaattaccttgggcagtatggccattttcacgatattgattcttcctacccatgagcatggaatgttcttccatttgtttgtatcctcttttatttccttgagcagtggtttgtagttctccttgaagaggtccttcacatcccttgtaagttggattcctaggtattttattctctttgaagcaattgtgaatgggagttcactcatgatttggctctctgtttgtcgggtgttggtgtataagaatgcttgtgattgttgtacattgattttgtatcctgagactttgctgaagttgcttatcagctgaaggagattttgggctgagacgatggggttttctagataaacaatcatgtcatctgcaaacagggacaatttgacttcctcttttcctaattgaataccctttatttccttctcctgcctgattgccctggccagaacttccaacactatgttgaataggagcggtgagagagggcatccctgtcttgtgccagttttcaaagggaatgcttccagtttttgcccattcagtatgatattggctgtgggtttgtcatagatagctcttattattttgaaatacgtcccatcaatacctaatttattgagagtttttagcatgaagggttgttgaattttgtcaaaggctttttctgcatctattgagataatcatgtggtttttgtctttggttcgtttatatgctggattacatttattgatttgcgtatattgaactagccttgcatcccagggatgaagcccacttgatcatggtggataagctttttgatgtgctgctggattcggtttgccagtattttattgaggatttttgcatcaatgttcatcaaggatattggtctaaaattctcttttttggttgtgtctctgcccggctttggtatcagaaatgatgctgccctcataaaatgagttagggaggattccctctttttctattgannnnnnnnnnnnnnnnnnnnnnnnnnnnnnnnnnnnnnnnnnnnnnnnnnnnnnnnnnnnnnnnnnnnnnnnnnnnnnnnnnnnnnnnnnnnnnnnnnnnnnnnnnnnnnnnnnnnnnnnnnnnnnnnnnnnnnnnnnnnnnnnnnnnnnnnnnnnnnnnnnnnnnnnnnnnnnnnnnnnnnnnnnnnnnnnnnnnnnnnnnnnnnnnnnnnnnnnnnnnnnnnnnnnnnnnnnnnnnnnnnnnnnnnnnnnnnnnnnnnnnnnnnnnnnnnnnnnnnnnnnnnnnnnnnnnnnnnnnnnnnnnnnnnnnnnnnnnnnnnnnnnnnnnnnnnnnnnnnnnnnnnnnnnnnnnnnnnnnnnnnnnnnnnnnnnnnnnnnnnnnnnnnnnnnnnnnnnnnnnnnnnnnnnnnnnnnnnnnnnnnnnnnnnnnnnnnnnnnnnnnnnnnnnnnnnnnnnnnnnnnnnnnnnnnnnnnnnnnnnnnnnnnnnnnnnnnnnnnnnnnnnnnnnnnnnnnnnnnnnnnnnnnnnnnnnnnnnnnnnnnnnnnnnnnnnnnnnnnnnnnnnnnnnnnnnnnnnnnnnnnnnnnnnnnnnnnnnnnnnnnnnnnnnnnnnnnnnnnnnnnnnnnnnnnnnnnnnnnnnnnnnnnnnnnnnnnnnnnnnnnnnnnnnnnnnnnnnnnnnnnnnnnnnnnnnnnnnnnnnnnnnnnnnnnnnnnnnnnnnnnnnnnnnnnnnnnnttaatattgttatgtgtgaatttgatcctgtcattatgatgttagctggttattttgctcgttagttgatgcagtttcttcctagtctcgatggtctttacattttggcatgattttgcagcggctggtaccggttgttcctttccaggtttagtgcttccttcaggagctcttttagggcaggcctggtggtgacaaaatctctcagcatttgcttgtctgtaaagtattttatttctccttcacttatgaagcttagtttggctggatatgaaatactgtgttgaaaattcttttctttaagaatgttgaatattggcccccactctcttctggcttgtagagtttctgccgagagatccactgttagtctgatgggcttccctttgagggtaacccgacctttctctctggctgcccttaacattttttccttcatttcaactttggtgaatctgataattatgtgtcttggagttgctcttctcgaggagtatctttgtggcgttctctgtatttcctgaatctgaacgttggcctgccttgctagattggggaagttctcctggataatatcctgcagagtgttttccaacttggttccattctccgcatcactttcaggtacaccaatcagacgtagatttggtcttttcacatagtcccatatttctttgaggctttgctcatttctttttattcttttttctctaaacgtcccttctcgcttcatttcattcatttcatcttccattgctgataccctttcttccagttgatcgcatcggctcctgaggcttctgtattcttcacgtagttctcgagccttggttttcagctccatcagctcctttaagcacttctctgtattggttattctagttatacattcttctaaatttttttcaaagttttcaacttctttgcctttggtttgaatgtcctcccgtagctcagagtaatttgatcatctgaaaccttcttctctcagctcgtcaaagtcattctccatccagctttgttccgttgctggtgaggaactgcgttcctttggaggaggagaggcgctctgcgttttagagtttccagtttttctgttctgttttttccccatctttgtggttttatctacttttggtctttggtgatggtgatgtacagatgggttttcggtgtggatgtcctttctgtttgttagttttccttctaacagacaggaccctcagctggaggtctgttggaataccctgccgtgtgaggtgtcagtgtgctcctgctggggggtgcctcccagttaggctgctcgggggtcaggggtcagggacccacttgaggaggtagtctgcccgttctcagatctccagctgcgtgctgggagaaccactgctctcttcaaagctgtcagacagggacatttaagtctgcagaggttactgctgtctttttgtttgtctgtgccctgcccccagaggtggagcctacagaggcaggcaggcctccttgagctgtggtgggctccacccagttcgagcttcccggctgctttgtttacctaagcaagcctgggcaatggcgggctcccctcccccagcctcgctgccgccttgcagtttgatctcagactgctgtgctagcaatcagtgagattctgtgggcgtaggaccctccgagccaggtgtgggatatagtctcgtggtgcaccgttttttaagccggtctgaaaagcgcagtattcgggtgggagtgacccgattttccaggtgcgtccatcacccctttctttgactcagaaagggaactccctgaccccttgcgcttcccaggtgaggcaatgcctcgccctgcttcggctcgcgcacggtgcgcacacccactggcctgcgcccactgtctggcactccctagtgagatgaacccggtacctcagatggaaatgcagaaatcacccrtcttctgcgacgctcacgctgggagctgtagaccggagctgttcctattcggccatgttggctcctcccccctacaaggtttcttttaaatgtcaaactytacataatcccaagagattctagttgcrttctttgmatcagttgctgaggaactacaaaacaataaaggtcccattgggacttttattttaaaacttagtagtagttttaaatgcatttatactttattacttaaaattacatatatttgaaaaatagatgcaagataaatttattccatcaattaactatatttgatgcactatggatttgaagatgttttgcagtaactctgaggcccataggttgagaagcagtgaattcagtggaagcactgatccccatagtgccaaatacagcttaaagatagtatgtaatgctccatgtatatagttgacatagacaggtactttgagcagttttaattatttataaaggaacacctgattatgaatattctacatttcattaggcagtaggatatgcagggtatatgtgtgtataggtgtgttgaatattcattcatttgctattctaggcattgaagaaagtggtaaacattaataataaaagctaatgttcatatacagatgttcctcaatttatgatggggtttcatttcgatcaacccatcataagtagaaatattgtaagtcgaaaatgtatttaatacacctaatctatcaaacatcatagcttagcctagcttgtattaaaagttctcagaatatttacattagcctccagttgagcaaaatcatctaacgcaaagcctattttataataaggtgttgaatatctcatgtaacagtattatactgcatcactggacagggaaaattcaaaatccaaaattcattttactgaatgagtatctattttgtcccatcataaagtagaaaaatcataagttgaaccatcataagttggggaccatctgtagtgattattatctactaaacagatcttatggtatgtattttaggatgtattaatcctattattaactttattttgcaagtcagtacacacagagatgtgaagcagtatgcccaagagtrtaaatcgaatacatggcagagccagcattcctactcagtgtgtttagccctcgagtctgtgcttttaatcaatttgctgtactgcctctcaaaatgytactacccccgtctcatataccttacattgcctttaatgaaaaagaaaacaatccagtaaaaaaataattaaacttgataaatttatgcatagatacattctgtgatatggaatgagtgctcgctgcctattttctctaggggtgtttgggagagccccactgaggaaatgacattggaggattaaataaggatatgttcaaacctctctcttctcaaccagctcctaaccaygagagcctttttcctctttaggggaacaatcaaaaatacagtcagtgcccaagaggtcataatttgtagcatctatgtaatgattagattgctagctcagtcatacattttcaacataatctcattaaatatttttcacattgtatgtgtaagtaatctctgggctaataaacactgcaatagaatttcaatattaaacatttttagggattgtttttactttgtgattttagtgcaaagttctgttacactgaatcattcccctttttttgttgttgttttcatgcattacatcttgcaagaactcagcataagttctaagaagttgaatcagaagtaaaaaaaaaaaaaaaatctactaaatttaagccaatgrcacttcaggctagccagcctttcttctcagctatgctgccaaratttttgtattttgaattgctttctcctaattccagcaacaaaaggtttgaatagtacgatcatgagtacaaagatccttgcagaggtgggatccttctcatctgtactgtttctactgattctcatgttcttatagttttcacccaagaggtctgcttcctacctttctaggacacactggtggcttgttaatctagaagcatgcatagctacatgctatttgatcacatttggtctgaaatatatgggtcacacagagcacagctctaaccttttggagcagaaggtgaagcttctattctcttattagctgtccccaatactcccttttctcacatgcaaacccctgtgtctctgcttttacatgttttttttggaagattcaagtcttytttctctttgaagagacctcttcctaatcacttcagttttactaactcctcttaaattttctgtgattccacatctgtttggggacacctatcatgattaagttgtcagttggctcttgtgcctaatttcaagaawttttcatgtatttccttggaacacattgtagacattggctcaatgcatttctctatgaggaggctagaatagagttgatgcaatcttgttcccttcatgaacttttctcttgatagcttaataatcaatgtccagtatctacccttccttccctctctatagggctttttttcttcaggtaatatttattgcatacctatactctgctttacaacttgcaaactgctgtgaatatagttttgaaaacttcaaaatctctgtcctgaagataatactttttagatataggagaattaacataaaattgtgtttatgtgaatatgcaacatgtacatataattcttaatgatagtaatattttattgagtggttatgatgggctagatttataccaagactttataccaagatgtattaacccatttgactttcataattacccagtgaattaggtactttattatgtcaaaattttagatgggaaaattgtagcaccggaattccaaaagtttgtccaagattacagagctgataagtggaagaactgggagtccagcccagccacattcattccagagcctgtcttcttttccagtatgttgtatacatttaaagtccccaaagtaatcattagtttcttaatacccttctttaccccggcctccagattaatcyasgacaatgcttatagctcatcattttcttatttcaatccttttggtggtttgtttgtttctacagattctcatgtgacatttaacactctcartccagtagaaactatcctaaacattttattttcactgtcaatcactttggttagcccctctcttctgaataatcattcctatgctatgccatttcccaaactatctcccttccacatagaatatctactttcctcttcaccaatcaatccaacagctatactttcttaagtaacagcctgggaccaaactcttccattgcttgctaaactcccatagcaagtatagcttgaaaacattctagggtgtcctattacactgactttaattattttccagttgctttggggctttttgtttgttttagttgcttttgcatgtgtttttataaccaatcagatgtgattttttagtggtagagatcacacattttactttttcttaaaacttccatagtaactagaatatgttcaatgctgactaaattcttcttgatggactttttggagaagaagaaatgataacttgatttcaagcacttcttctacagagaaagataatttccaaggaaaagtaaaacaaactcaggttaatgctttttttgtttgtttttgagatggagtttggctctgttgcccaggctggagtgcaatggcatgatctcggttcactgcaacctccgcctcccgggttcaagcaattctcctgcctcagcctcccaagtagctgggattacaggcatgcactaccacgcctggctaattttgtatttttagtacagacgatgtttctccatgttggttaggctggtctcaagctcccaaccttaggtgatcggcctgccttggcctcccaaagtgttgggattacaggcgtgagccaccacgcccagccattaatgccctttctttatgtaagtgacagtttatagcacatggccatactaattatctaaaatgattctccagaatttgaagactatgaactttgattacacacagtataagttaaagagtgcccctgacttactggtattacttggatgctttttatgcacatatattatttgatcttttcacctttagaacagacgaattagagatattaggagaagaggcaaacctcagttgcataggatgctgtttccccagaaatcttgtttcttttgcctttgttctatgtcagagagtgctggggaaggtggtaagacacaccctagtcattggccagaatttgaagtgggtgagtagacttctgacatcatggtgttcttggtattcccagttttcttctttggatgtactgttttaaattctacttcctstataaacaatagtataaatgtctaccagtgaatcactgggtaactaagtgtacaaaaggccttgaaaaataagtataatatrtcgtatgtaactcagttacggaaggctatcttactttttgatgtaactaataataagctagtcaccaaatgcaactgtataataaaatgttggattataaggaattcaatagtagttttaattgcagtccctaagcatttataccaaatttgttgcatatgtgttttgaaaatctgttggccaatagccatcattgaattttataagagaaactgaatatcaacttgatactttatttgcaatatttcaattayatacctaccataaggttggcagttccataacagtgttttagagtattaacagagccatactaattggcccccagacaaaatctgcagtgccaggcctaactttggggcagtttttaagcaattaccattatgaagtcaaaccactttgaagtatttactttacaatatactgtatactggaatggacagggaaataggactttattttcaatatgtttctaaaagagttctacttttggggcttgaaaacacatttcctcttaagtgtaggggattcataactcactatcaaaataaasgcaatcagaactaccagatttaatacataagtatcttagatatattctaaacatatacacttaaggataattactctatttgaatacagctttagtgaattcatattgaagacttggaatttacgcttttgtatagaagattaaaaagtgctcttatgaaagctctaataaatggcttgttgggcaatatgaatattcaaaagggtgccaaayatgcaacaaaatgtatctgaaatatcctattgtatgtacaatagagatttattgttctataagaaaggaaataagcctcattgaatattttagggtgatatacccttctggaaattattttaaatcattgcacaaatttttttttcaagtacattggccagaaaaggtgctatctgtattaaatccgaaggctaaaaaagaaaaaggtattcatacagagagagtcacaacctctcacacgcacattgctctgtacaactgaacctactccttttgctcattttctgttcttttacctagaggagctcaagtgtatgttttctcaagattcctatcttctttgctagtgcttgatcttcgtgggcctctgtgggtctgaaattataagactgatataatatcagagagctgaatggaccccagggagtagagagaattcgaggaaatcacgtagttggaggctccccatggaggtagctgagcctgagttgaatttcacattagtgcataaagagtaaggatgtcaatccaagctggagtcagggttatttgagtacttgtgtctcctacttrgcactgccatttgctttactctcttaccacagagaaacccatttcttyactgtggtgcatgcgaaaatttgcctggaaatcaggggccatactgctttggggaggatcattacctgtgacagggaatattcaggtagccatattggagtaatatgtgcatgatccctgagcagttgcaggtagacatagacctagatttttattgttcttactatttgttacagttaaacttgccaaatccaaggcatttatttttgtagcttcttgattacaaaagctgtgttttgggggcaatgtaatgtttggaggtctaaaaaaggaatttataaatacaacatttaatttaacattaattgaatttaatgtgtgaaggtctaaacaaagaaatttctaaatataatgcaaaggctcaatactaaagttttaacattaaaatgcttcttaaagattggccttagctccttgattctgttttgtttcagttagccattacaagccattgtgagaaatactaatactaatattcacacattcctgtttcaaaagtgtgctgctaatgattgatataagttataggtgggcatagacttttgtgagtcattctttaggtaatgtgccagagggtagtttaaggacatggattttggagccatattgcctaggttcagattcatctctgtcacttacaaactagtgaccttggctgagagtggtggctcacgcctataatcccagcactttgggaggccaaggcaggtggatcacctgaggtcaggagttcgagactagcctggccaacatggcgaaaccctgtctctactaaaaatacaaaaattagccgggcattgtggcacacgcctataatcccagctactcaggaggctgaggcaggagaattgcttgaacccrcgaggtggaagttgcagtgagcygagattgctccactgtactccagatgggtgacagagtgaaactccgtctcaagaaaacaaaacaaaacaacaacaaaaarcaaaaactagtgaccttgggcaatttacttaaatgccctgtgctaatttattaatctgtataatgggaataatacaacagtggtatctatttgtagggttgttgtgaagattaacattatatatgtatttatttattaggacaataaaacagtggctggcactagatatgccctatgtaagcatcagctattattattactgcatgccttaaaatgttcaatgaaacatttttctcagagcatccatgtgctcagactttgagaatggtagaaattatgctcaactttgaacaattgttttgtattgggtttcacgtctggtacatatacttgaaggtgtctgtaaagtgaggtgaaaatcgcctaataggtttttttctctttggaatttaggattttagtcgttatgtaaaaagcaagatacatatataggaagttgttgacttctgtaggagaaaggcatagtctgatagtgaaatatagaaagtaataagtaatttttgagttagtttttaaaagagaataaattaaattcaattaaaacaacaagatgtgtctgttattgaagatagatcaaatatgctacgaatgttgtcagggtwggaagaatagaaatgttgtagaatttactggaaaaaaattgaattaaatttgaattaaatttggcttacaaatttaaaggtaactgatatggtttggctgtgtgttcctcacccaaggtgagggataggagtgaatactaatgggtatgagttttctttttggtgtgataaaaatgttccaaaattatattatggcaatggttgtacaattctataaatatactaaaacccattgaactgtaaacttgaaataggtaaattttatggtatgtacattatgtctcaataatactgttaaaagtacattagtgaaaaaagaactaatataatgcactacactaacaaaacaaaaaacatgaacaatcatctcaatgatttctataaaagcatttagtaaaataaaacgtttatttgtaaagtatatcttaaaaatcctacatgaacttactagtgaaatttttgaaattttttcattttaaaatgactggtataaaaatatgtctgttacaatctacaggtccttgttagtgaaataagacaatataaaaataaaatgtaaatattggaaaagaaataaaactgtcactatttgtagattgtaggattatttatgtagaaaattcataagataaattactagaatttataaatgcatatagcaaagttgctagatatattatataataatataatagaaaacaataaagtaaatcagttaccacataccttagcataaaaaaaagtcaaatattggccmcatgcggtggctcacgcctgtaattctagcactttggtaggctgaggttggtggactacttgacctcagtggttcgagaccagcatgaacaacatggcgaaaccctgtctctataaaaaatacaaaaattagttgggggtgatggaatactcctgtagtcccagctactcgggaggctgaggtggaaggattacctaagcctgggaggcagaggttgcagtgagccgagattgtaccattgcactccagcctgggtggaagggtgaaactctctcaaaaacaaaaacaaaaccaaaaaaaccatacaaatatttttggaacaattgtaaaaatgggcaagaccattacatagaaaattccagagctctacaagcaagagtgctgggagaaattgaagaaaagagaagtaatcagagggatagattatatttatgtatctttagtctaggtatgcatctgtgcatacccagtgaaaagttaagccagagagtgaaggtatttctaaatatatgtaactaacaaataatgcataactagaatttttaaaatctacaaatcaataagaaaaaggcagacaacataatagaaaaatcggcatgatatttgaataggaagttcacagaagaaaatatccaaataattaccacatgaatatattaaaaggaacctaacctcattggtaataagagaaaggcaagttaggtaccactacacactcatcaaaatgactaaatttcaaaaggcaacattagttatggtttgctgagaatgtgcagattataggagtcttcctacactactgataggaatataaattggtgaaaccactctggaaaaatacttagcactatcttttaaagcagacattttgcatacagtataattcatcatttttacttctaggtatatccagcagaaaatgtatatatttgcctcaaaagacatgtaaatagacattcagarcatcactattcataatagccccaaacaggaaaaacataaatgtccatctagcaaaatagatgaataaatatgacagttatataatgaaatgccatacagaaatgaagaaactaccatcatacccaatgacaaggctgaatatcacaattacaatgtgtgtgtgtggggaggtcagatacaaataaatgtatatactgtatattttcattgatattaagttttaccaaatagtcaaaactaagatacagtgttagaaggcaggatagtggtttctctggaggagatgggaaagggaaatggctggggctgagcctgtatggttagcaattactgtctttgttgtcctgatgacagttccagaggactttgctttgttgtaagtcattgagctgtacccttataatttttgtacttttcatatgtgcattatgtgtcataatacaaaacagttttaaaagatgattaagctatactggccacaatcatgaatctttcaatgtgcatatggtgaatttctatatatctcactgtataaaggtttttcaactaaaatagagaccaaaagtgcagtaaccaaaatcacacaatggaatttcatctgtgcatacccaggaatatttttaatttcaatgttgcccactgtttccacaagtcttcatgacaaggtagtctacttcttttcatcatctaagatttaaacaggcattcttagaatgtctgtttcacaccaagmcattgaagaggctgctattgagaaaggatctgaatacaactgccaggattttcagcacagaagggcacratcaaggcagtttttytcctatgctagtaagactggcaccatatcagaatctctagccctctgagtaagtccttgagagcaaatgcagtcaaggttgtcaccaccctatctgaaaactactgaaccttaaaaaatgtattgcatattcattagtgatcactgctgcagaygggaccgtaaggcaatcttgcagatgaatgtgtaccttctacagatattttttagcaaagtgcactgtccatgaaattgtaaataaaaacatcttggaaacagctgtatattttttctaggccctcctggctattctgttttcctaaaggtctgaacatgatgcgttcacgctaatcatgtgtttcttggaaaacatccttcttacctctgcacatgtattgctggcagcacatttcagaggtgtttaggtgtatgtaggggtatcaagtttttttttctttaattttctctgaaatgtttggcccctcatagcaagaaagaagcttttgaatagtgaaaggtagcttataatttgggggacactgcatgagcttacttaagatttaagataaagttctttgtatttcagtggcaatgataatatattaaccatcaagttatatgttttttaacccagatgtgaaagagagcttttggacagtgtgaaaaaaatcaggatggattatcacaaagaagagaattgtttcttatttggaagtcttagcaagtagaatttaatctcttctatttgkgataacacacatggaacacagactagagaaaatggttgcttctaagcactttaacttatttttccttgggatgataatatgaaaacaggtgactttagacacattttgggcagtttgttcctggattataacattttaccttttgtcattagcactggatgaatttgcgactcttgttagagaaccatttatagctcatactttaaaccagtccttgccaaatatttcagatcataggttttactttgggtgctttttaaaaacacatttgtctgggtctctcgtgaatctgaatctcttaaaaaaaaatcctagaaaacattatttatgtaacgagcaacccgggagattcttatgtccaagcacaagggggagacgcgatttatacatgaaactttggattgggatattaaggatatcaaaagattcttcttcttctctgtatgaaatagagataagatagaaagacatgattacatacaaaagcaaaagcaaacttaaaaattttattttttaagttataaatccacttaatatttaaaaatatgggtagtctgttacatagcaagagctaattgtgacaaatgactttttataagattttacagtttataaatcagatatatttacccagtcagttctcataaaaaccctgtgaaatataggttactgtgatcaatctcagtttctaaataagtcttgggaattcatagaagttaagccgcttaatccagtatctcttgcaaagttgaatctcatttaattttaaaataatttatgttgaaatgacttttctacttgtgattctgccagaagctaatgttctgaatgtcatagacatcattcctaccgaactccttttcatggaatggcctagagaaaacaatatcttgaaatacaaacctccattytaaagtgaaataaccccatcatgttttttyccttttaaagcaggaattctttttttttttttttttgggctgtcacttttatactggaatctggtggtgataataatctactcaaagttctccaagaaattatttgtttttgtcttgaaggcagagtaaacattcttttctccctgtttatttaaattttaaggccaaagtgcacttaaattatccagaaggctaaaaatagcagcataayaaccacagaatagtttatctttctattagctgttctgccagtcagcattaaagttcattcccggggcaaaagcaggattgcaatagagcaaacagaaacaatgaagtactaagcagccattctaataagacaaactccctttaaaaaggagtacataataaaaattcaccaagtatgtagggaaatttatcaccatgaaggagagataacaaaggcaataaacagaactcaaactcgaagaaacagagtggttagaaaaagaaaagagtttcttatgaggatgcattttagcacagagaaatgcaagcaaatattgctacctaaaacttaatcaactaaatcatatggattaaaaattgatcaatgcacataacagcaaaacagatgaactaaggagagcagaatggctcctgaaacagaagagtaaatttacataagcagattcttgatcagcgtcatttcattcagtattttatgttgatgaaaaaaaaagattcctggcagagccactgtctgggtggagtttgcatttcctccatgtgtcttcatggtttttctccaggtactctggtttcctcccacatcccaaaggtgtgcacattaggtaaattggtgtgtctacattgctgcagtgtgagtgattgtgagtgtgtgtgtaagtgtgccctgcagtgggatggcatcctgtccacagctggttcctgtcttgtaccctgagctcttggtataggtttcagccacctgtgatcctgaactggaataagcaagttggaaaataaatgaatgaatgagtgaataaaaattatcatgctataaaaatgtgtaaagtctatgaccatacaaatacatgacaaaaacaatgcagtaccaaagctctcagtgaacccatcatatttgttatcattttttttgaactgcatagtgttaggaggtgctccttgcaagttttactttgaaaacrtttattctttgatttgaccatcacaactgtgactgctgtcactgattcaccaaaaactgggtaaataatatcttgtttttattaatcttttaaaaatgcacatatagctcacatttatttcaatgtttaatactgtaattgtttttggtctttattcagaagtttggtgatgttttgcaactagaaatataccataggaacttaattcttgtttatgtcagttaacctatggtaaaattggtttcattatgcattgttttgcttaaagtcaaaattttcaaaaacctattgacaattttaagtgagggcttattgttctaaataatcaaatatttatagaatgcaggacaaaagaaaaagatgaaaagtttgaaagataagacaaaatatagacaataattcccatgttccaaattgcatatactagaagactcagaaaagagtggaagaaaagtgataccttatattaaataaaatattagacaactatttcttagaattgaaaaagttatgtcttcaggttaaatgcgtatacctctgcaagcactcagcaagatttagagtgagctatcagagcaccacctatccaaataaaatttagaacaccaaggacaaagacaaaccctaaaatcttccagagaaagagaattgtttactaggaaataatggtaagattgaaattggatttacataaacattcactagattcaccagatgcaagaagataatagaaacatacatttgaaggtaagtaactttgaacttgtaattatctgatcattcaattgtgagaaaggaatagggtggttttgcacatgaatgattcagaaaatgtatcatcacttatagacagaggttgatttactcttaggtgccctccagcaagaagacaaatatgaacctaagaagaagaaataagatacctgaagtaatgataagtaattaaattatttaaaattattgtaaattctaaataagtattaactataattattttttctgaaattgactacttataataaaaaatttccaggtggtatcaacatgggatggcgaataaaagcaaaagcatattctagttcttgacttttggaggggatataatatgtacaaagtttaatactagtcgttgttaaaaacaatatcattataaagaagttgtttaaaaattaaagtttactgtaattggaagaagaaaaataaaacactgaaattattagtaaaaatgaaagcaacaaagaaaatttgattaattcagtgattaattcaataaaggatgaaaaaggggaatacatatattttaaaatctgataaagggaaaacaacatgtaagctcacaggaaaaaaatccatgtaaacatgaatgcaaaactcttaaataaacatttaaaatcgtatcaaacagtccattgaaattaaaatatgtcatatgaacatgtaatgtctatcccaaaaatgtaacaatgatttaacaacaacaaaatctgtcaatgcaatatacaatatcaacatcttaaagcataartacagccttttaaatataacttaaatggcattccgtagcaaacaaggacttgaaaggttgttatcatcatcttgataaagattctttacaaagrtctataaaaataagtgtcatactaaataatatttgaagctttattgaaaagggtgacaagaaagaaggaccatttttaccagaagcccagccctggcaayagcagtaacagcagcaatgacaatataagtggatgatagggtttgactgtgtccccacccaaatctcatcttgaattgtagctgccacaattcccatgtgttgtgggagggaccccgtgggagataattgagtcatgggaatgggtctgtcctaagctgttcttgtgatagtgaataagtctcaggagatctgatgggtttataaagaggagttaagatgtgacttgctcctccttgccttccaccatgattgtgaggcctccccagccacaaggaatcgtgagtccactaaacctctttcctgtataaattacccagtctcaggtatgtctttattagaagtgtaaaaacagactaatacaatgggtaatgtggggaaggcgattgtctcatagacaatccaagagaatcagctgataagctatcagcactcataagcttatttgcaaggttgctagataaaatatcaacatatgaatgtaattactttcctgtatgccyatatgtgaattttacaaatgaggaaatataatattaaaagtctaaataaaaatcatgcacaacaacaataaaagcagcaaactttcaagcgcctaaggaaaaggccaacaaataatgcccaagaaatttaggtttaacattctaaaatatgtctaaaatgttatttgagaaattttggaagaactgcgtacatggagaaatggaaaattttgtgggtgggaaaatttattattttaaatatttcaatgatcagaaagcaaatctataatcatgatttttttccatcaaactcaagaaactaacagaaatttataagtaaaaaccaatgtcaaaaatagttaagacaatattaaaaagcatagtggtaggagcttgccatattaacatcaaagcattaacaaacaatagttaaatcagaatttaaccattattagttaaaaagataatagctaatagaaatataataaagagcctagaaacaactcttttcctctttctgaatttgacatgctataaagtggacattttaaatcatcagggaaaatgggctattcagtaactaagagaataagttgataatattctataaaagtttaagatatgatttttattcacacaactctgaattaaaaatagattaaatatattcatgtaaaagtaaatcataaaattattagaaaacaatgtaaaagaatatatatttgatctttaactggaagaacacttttgaagtaagtcacatagccaaaacttaaaaggaatgttataggcctgttatagaaatgcctacaacacattgtgagaagtgcagatggaatgagagatgttgttgctaccattttggaaaatgaaatctactacatacactattgaaagaaaactaagatgccatgcttatatgcctccaaaattcaaggtgtaatgatatctcaagtcttatatcttaagaatctttatttgagatgtaattttttaaattatactttaagttttaggtacatgtgcacaatgtgcaggtttgttacatatacatacatgtgccatgttggtgtgctgcacccattactcgtgtcatttaacattaggtgtatctcctaatgctatcccccctccctccccccaccccacaacaggccccrgtgtgtgatgttccccttcctgtgtccatgtgttctcattgttcagttcccacctatgagtgagatcatgcagtgtttggttttttgtccttgtgatagtttgctgagaatgatggtttccagcttcatccatgtccctacaaaggacatgaactcatcattttttatggctgcatagtattccatggtgtatatgtgccacattttcttaatccagtctatcattkttggacatttgggttggttccargtctttgctattgtgaatagtgccacaataaacatacgtgtgcatgtgtcttcatagcagcatgatttataatcctttgggtatatacccagtaatgggatggctgggtcaaatggtatttctagttctggatccctgaggaatcaccacactgacttctacaatggttgaactagtttacactcccaccaacagtgtaaaagtgttcctatttctccacatcctctccagcacctgttgtttcctgactttttaatgatcgccattctaactgctgtgagatggtatctcattgtggttttgatttgcatttctctgatggccagtgatgatgagcattttttcatgtgttttttggctgcataattgtcttcttttgagaagtctctgttcatatccttcgcccacttgttgatgggtttgtttttttcttgtaaatttgtttgagttctttgtagattctggatattagccctttgtcagatgagtagattgcaaaaattttttcccattctgtaggttgcctgttcactctgatggtagtttcttttgctgtgcagaagctgtttaatttaattagatcccatttgtcaattttggcttttgttgccattgctttttggttagatgtaatttttaaacaaatttaatgctgaaaagttttagggcttctgtaccaaatattttagcttataaacaaatgttgtagggcaaagaaaatttaaataatttgtctaagtcattgagatatttatactctcttaacttcagtagagttatcttccaattaygtaccctgtctattaaaatgcttagatttctattatttcccatctttcatgtatctgtgaccataaccaagtgatcagtagtatttccactctttctgagaagttttagaaatgcaggtgatgccttccttccttgttgtaaacaaattttatatagccctgtgtgaaagttacaggaatctttaaatattacagtaagcatgaggctaagcaagacctcaggtgtcgagctgacatattcagttatagtaacaaggccatgcaagacaaaaacataattactccaaatttgttttcagacatttattgaccttaagaatgcagggtctattatactcccctcatccaaaactaatcactgacacttcataacttcaatactgacaaattttcattcagttgctatcaaaggttgaataattaaggcactttcttctggaatgtttcatttaktttggagtgcaatattgaaatctaattttgaagatgttcacttgtcgacataatatttttaaagttctcagcaattacttctgagggatagttaaggatagcgtgatagcctatttaatctttcccaggactcttatccactgaggagtgaggagacttcttgaaatatgttgatttaccatagcttatcaaccaactttaatgggtctttaaaaagctaagtctgcagttaaggactcagcaagagggtattagctcctaccaattttcacagctttacggggaacaaaatgttccaaaagtcatctcaggagaggagcagagataaagtaaatagtccttacatatatgaaagatagttctatatttttgcatctaaactgcataaaattatatctgcaggcatatagtgtacmagtaatgtcttgacaagcagttgtttattataaatttttaactttttattcagatgcctttgatttcattaaacattaaaataggattcacagctgaagatgagtaatccagtatgagtcttatgtatgtaaaataaagttagtgtttttacatttctattagcatattttaagagttgcctcaggaaagtgctcgcttggcagtgagctgagctcactgtaacttgatattcagataatgttgggggatatgtcagagtccagcgtggaactattcaaaagaccatgggtacagggagatatttcttccttaaagtttgaaggctttctagcagctcaggatcttccaatgtgatccttgtggatgcccctagacgtgcagagatatatgaaccccatggcttctctcgtggatagtgcttcttattatcagtattcatcattttctttctgttgttgccttcttccacaactacctcaagggaacatcatttattctcaggttggtagattatcttgtcttcgatccctatactcatctagttgtatacctgattttgtaggctgattaatcctagatttacatctctagtcccaatctcttccctgagctccagctgctttttaaatatttggcaatatcaacatcaacatccacaattcatcatgtctaaatcygaactcttgatcctccttgctcttatttctctcatctctgtcagtcaatagtatcaccattcagtttcaaacccaggaattatctttaaatcttctcttctcttcaccctccacaattaatattccaaaaaatcctcttggcctcactgcaaaatatatgatgtaatttatcaagtaatctattcaactaatatgttaaaggatcaaataacatgcccagattatagctaataagttgtagaacttcttttggataacatctactgtagcctagtttatgtgctctcttgctccatttctgttgtggtctatkccccatgttaacaaccagtgtaacctttaaaatgtaaatcatgaaactgctacttttgtgaagacggagtacatgtattttttttattactctcagtaagtacaacaaaaaaaccctgaatattatacataacaaatataaaaagtctctgaaaggtggagagaaaaagttagatggctagggacttcacgacccaaggaatggcacaccatgagttcctaggttgtgtttttgcctggaatatcctagatttgaagctgaaaaagctggcaacctagaaatgccaacaggagcagacaacaaaacaaaacacgacaaaacagaacagaacaaaaccaacaaatatcttttctgtttaggcaaaagaccaggaaacgggcagcctagcaaggcagaagacttttagacaataaccattttgcttcaggcacaaatcacagaaaaatttcctacccattccaacaaagaccaagaaggaaactaaacatcttggccaggcattaatgagcccccaccccaacaaggtgttgacagaaaagccaagtaggaaccaggactttcattcctgcagggtgtcagggtgtcagaggagaccatgcggtgagtctgaacttccaccactacccagcattaataaagtgcttctcttcttcccttctaggggtggtatcagaggaggtctagtagagtcaggcctcaaaccaccacccactgataagagggccatctccttgcagagttagtggaagctaggctacaagcaatagcaggcacttctaccttttccagcaagggagttatcagtggaggcctgttggagtgatggaactccaacccctggttgaaagtaaccaggaatcccacctcatgtacaaacaaaggctgggtagagaacctggacatcttcttgtactgggcagtaacaagtcagtgtcattccttcccctacttgagtgggtgtcagaaaagccaactaaagcagaaggtttaattaagatacagagttttatgatataatacccataatgttcaggtttcaataaaaagtcacacattatacaaaaaataaggaagatctcaaactgaatgaaaaaaggcaataatagatgccaacatcaaacagagatgtcatactgaaaaatattttaaagcagccataataaatatacttcagtgaacactaacaggctcaaaaaaagaaaagcaaaaaggaaagtctcagcaaagaaatagaatatataaagaagtaccaaatgaaaattctagaacttaaaaatacaataaccaaaatttttaaaaactcaatgaatttgctccacagcagaatggtgagagagataaaagaatcagtgaacttgaaaatagaacaattgaaattacccaatctaaaaaaaagttgagaaaatagactaaaaaatgaacaaagtcttagggacctgtgttactatttcactatttatgttatcaagattcctagaaagaatacactatttatgttatcagagtcctagaaagaagaagaaagtgtatggagcttaagaagtactcaaagaaataatggctgaaaaacttcccaaatttggcaaaatacacaaacctatagattcaagaagctgaacaaaacccagagaagttaaataaaaaaaaaatctatactgacatacatagtggttaaaattatagataaagaaaaattccttaaagtagagagagagagaaagggagagagaggtgtgacactacctgaagtaaaaaaacaatatgagtgacaatggattagtcatcagaaattatgaagaccagaagaaagtggcacaatatttttgaattgctgaaatgaaaagaacagaactgtcagcccagaatcctttatccagtgaaattattttttagaaatgaaaggggaaatcatgtaatatcagatgaaccaaagctaagagaatttgtcaccagctcagaattagtcctaaaagaatagctaaagaaagttcattaaacacaagaaacacaataaaagaaagaatcttagtaaatgaggaaagaacaaatacatagtaagcaaaaacatgggcaagtacaatatrttttctttatcttcttgagttttctaaattatgtttgatggttgaagcaaaaacataacaccacttgatgtggttctaaatgtaaatagaggaaatatttagattgattagattataaattggggamggtaaaggaacacaacaggaaataagatttttaaattttgctcaaactggcaaaatgtcaatgcaagtagaatgtggtgtaatctataaataatgaaaaatctacaggaccactacaaggttatatacacaaagtgacacacaaaaaaacaccatggaaaaataaaaatgaagttctaaaaagttcaaataatccatagaaaaagcagggaaacaaaaacacatgaaggaaaacaaagagaataaccctccccccacatgaaaaatctaaaatggcagatttaggccctaaaatgtaagaattatattaaataaaaatgattgcaaatgtaagaattatataaataaaaatgatttcaattaaaagatagagattggcagaatgagttaaaaactataacctaattttatgatatcdtatttattttatgtataatgatgtaggtaaattaaatttaaaaatgggaaagtatcatacaagtattaatctagagaaagctggattgatcaaagaaaattaccagaaacagagaagaatgttttataatgatatgtattataaagaatcaaatatgtcactctatcaagaatatatgatcctaatgcttatgcactgaacaagttgcaaaataagtgatgcaggaacgtacagaactgaattaggaagaaaattttcagtcttttgccattaaatataatggtagttataatgttttgtcaattcctatcaagttgaggaaatttcttccattctattttgtgagagtttttatcataayggtgtgttaagtttttccaaatgtgtttctgaatcaggaaaagccatggatgtcagctttcaccactcttactmaatatagtgatggaagttctatgtagtgtgccatggcaggaaaaggaaattaaaatcgtatagatgagaaagggagaaataaaactgtccttatttacagaaaacatgattgtttatgtagaaaatcccaataaatctaccccaaaactcctgtaactaataaatgagctcagcaaagtttcaggatacaagataagtatataaaattaattgtgttgctatgtactagtaatgaacacatggrcaccaaaattcaaaatacaataccatataaaaacactcagagataaaaaagaaatacttaggtgtaaatgtaataaaacatgtataggacttgcatgctgaaaactataaaacactgatgaaagatcaaatgaggttgaattcaatggagagatatgctatgtggattagaacactcaatatagtacaggtgttaattttcctcaaattcatatataggtttaatgcattcccaataaaaatcccagtatgattttgtagatatagacaagattactctaaaattcataaggaaaagcatagaccctgaagtattgaaaacaattttgaaaaagaataaagtgagagaaaacccatctagtcaatttctttattttattttattttattattattatactttaagttttagggtacatgtgcacaatgtgcaggttacatatgtatacatgtgccatgctggtgtgctgcacccattaactcgtcatttagcattaggtatatctcctaaagctatccctcccccctccccccaccccacaacaatccccagagtgtgatgttccccttcctgtgtccatgtgttctcattgttcaattcccaccaatgagtgagaatatgyggtgtttggctttttgttcttgcgatagtttactgacaatgatgatttcgagtttcatccatgtccctacaaaagacatgaactcatcattttttatggctgcatagtattccatggtgtatatgtgccacattttcttaatccagtctatcattgttggacatttgggttgcttccaagtctttgctattgtgaatagtgcccaataaacatacgtgtgcatgtgtctttatagcagcatgatttatagtcmtttgggtatatacccagtgatgggatggctgggtcaaatggtatttctagttctagatccctgaggaatcgccacactgacttccacaatggttgaactagtttacactcccaccaacagtgtaaaagtgttcctatttctccacatcctctccagcacctgttgtttcctgactttttaatgatcgccattctaactggtgtgagatggtatctcattgtggttttgatttgcatttctctgatagccagtgatggtgagcattttttcatgtgttttttggctgcataaatgtcttcttttgagaagtgtctgttcatgtccttcgcccactttttgatggggttgtttgtttttttcttgtaaatttgtttgagttcattgtagattctggatataagccctttgccagatgagtaggttgtgaaaattttctcccattttgtaggttgcctgttcactctgatggtagtttcttttgctgtgcagaagctctttagtttaattagatcccatttttcaattttggcttttgttgccattgcttttggtgttttagacatgaagtccttgcccatgcctatgtcctgaatggtaatgcctagggtttcttccagggtttttatgggtttaagtctaatgtttaagtctttaatccatcttgaattgatttttgtataaggtgtaaggaagggatccagtttcagctttctacatatggctagccagttttcccagcaccatttattaaatagggaatcctttccccattgcttgtttttctcaggtttgtcaaagatcagatagttgtagatatgtggcgttatttctgagggctctgttctgttccattgatctatatctctgttttggtaccaataccatgctgttttggttactgtagccttgtagtatagtttgaagtcaggtagtgtgatgcctccagctttgttcttttggctgaggattgacttggcggtgcaggctcttttttggttccatatgaagtttaaagtagttttttccaattctgtgaagaaagtcattggtagcttgatggggatggcattgaatctataaattatcttgggcagtgtggccgttttcacgatattgattyttcgtacccatgagcatggaatgttcttccatttgtttgtatcrtcttttatttcactgagcagtggtttgtaattctccttgaagaggtccttcacgtcccttgtaagttggattcctaggtattttattctctttgaagcaattgtgaatgggagttcactcatgatttggctctctgtttgtctgttattggtgtataagaatgcttgtgatttttgtacattgattttgtatcctgagactttgctgaagttgcttatcagcttaaggagattttgggctgagacaatggggttttctagataaaaaatcatgtcatctgcaaacagggacaatttgacttcctcttttcctaattgaataccctttatttccttctcctgcctaactgccctggccagaacttccaacactatgttgaataggagcggtgagagagggcatccctgtcttgtgccagttttcaaagggaatgcttccagtttttgcccattcagtatgatattggctgtgggtttgtcatagatagctcttattattttgagatatgtcccatcaatacctaatttattgagagtttttagcatgaagggttgttgaattttgtcaaaggccttttctgcatctattgagataatcatgtggtttttgtctttggttctgtttatatgctggattacatttattgatttgcatatattgaaccagccttgcatcccagggatgaagcccacttgatcattgtggataagctttttgatgtgctgctggattcggcttgccagtattttattgaggatttttgcatcaatgttcatcaaggatattggtctaaaattctcttttttggttgtgtctctgcctggctttgttatcaggatgatgctggcctcataaaatgagttagggaggattccctctttttctattgattggaatagtttcagaaggaatggtaccacttcctccttgtacctctggtagaattcggctgtgaatttcatgatgtattatacaacttgttgtatagctatagtaatcatgattgcataggactggtggagaaatagacacattgctcagtgaaatacaatagagaactcagaaatgggcccacaaatgtatgcacaactaatttttgacaaaaatgaaaacaaattcaataaaggaagcatagctttttcaacaaatggtactggagagtttgtatttccataaacaaacaaacaaaagaactttgatctgtgtctcatgtcttatataaaaattaatcggaaatgaatcacagaattaaatgtatgatataaaactataacacttttakaaaagatataggagaaaatctttaagatctaggacaacaaagagttcttagaatattaagtgccatctacaaaaataatatttgataaattaaacctcatcaaaattaaaaagtttttctctgcaaaaaccttatggagaagacaaaaagataagctataacagggagaaaataattacaaaaaaattcataaaacactgttacataaaatatataaagaattccccagaacttaatggtaaacaaaaattcacttagatgatgagcaaatgttatgaataaacattttgctgaagaaaatatagatttgcaaataagcaaatggaaaaatttttattatcattacacattaggaaaatgcaaattaaaatcacaatgagaaacttagcactacacacatatcagaatggctaaaataaaaacaaaacggcaaagactgtaggcaagaaaatggagaaactatatcactcatacattgctgatgagaatgtaaaatggtacagcaactctggaattcagtatgggagtttctttaaaaactaagcatgcaactaccacgcaacccaggaatagcactcctgggcatttatcctaaagaaatgaaaacaggtacacacaaaaatctgtacatgaatgtttagagcagttttatttctaatagccaaaaccagatatcctatagtaagtgaatggttaaacaggtacttgttaaccatgctaacttatatgaatggttagcaggtaccgtggaatagtgcctggcaatcaaaagaagcaaactatcaaccacctctgtgaatctccagagaactttgttaaatgaaaaacgccaatcccaaaagtttacatcctatgtattccatttctataacattctggaaatgataaaattataaaaatggaggacagatgaatggtgctgggtaatcccaaggttacattgtatgattccatttctgtaacattctggaaatgataaaattatagaaatggagaagagattaatgttgctgggctataaggacagcgtggggatggttgtatagagacagcatgagggacccttgttgtgatggaagtattctgtatcttgacaatatcagtgtccatatcctgactgtgatactgtgctacagtttcacaatacgttactaatggaggaaattgggtaaatggtacatgggctctctctatattatttcttacaactacatgtaaatccacaattatgtcaaataaaaagtctaatttaagagcagcaaaatgtaaatcagattcctcccctgctaagagtcctccarttggtttctcataattcttcagataaaatccagacaaagtcccaaaagatgtagctcctgcttacctctctatgttctcccctttgctcttcctctaatataccaagctggccttaggsccattgtacttgctgttcattcccactgcctaacattttctatattccacatgatcaacttcctcacttagttcagtcttctactcaaatgtcaattcctcagacatacttcacctatcaccctatttaaagaacttttccccatcctcaccagagttctttttgtctctttctctcctcctccactttctactctttctcctccttctcctcctgctcctttcctctctcactttctctttttctctctatctttctcttctacatactgtctataattgatcaaagttagttaagttataaaataattttatttccaaccaagtaaatacttgcttccaaccaagtaaataaaatattataaaaaatgctaaggtcctttttgaccataaaattaaatctgtcttttccctacctctttgttagatgtctttattatcagatgtttttctatggatttgtatacatatgtgatctccgtatagattatatagtgctctatttcttcctttattgtttctgtgtagatgctcccaaatgctataagcaaatctatccatgagagtatctacatatataattagtattttatacattaagtgtctcacattttatttagcaattttatttattgtattgaagaactgccatgttctccaatattttttttttgctgttgtttttgtttaaaacaataatgaactaaacatctttgtatatgtctttttggctatatttgtgatcactgttttatcatttattttaatttcccatgtagtgcaatgactggtaatgtgaactttaattttcagatgcataaatttttctatttttattgatgattactaatttttaaaatagagtcaatgaataagtactgtaaaatactaatttttgaaatgaaattgtctttacagtgtggcacaacaattttttttgtaaatgtactaaaaaagaatatgctgtcttttgtgcaacattgtgtgtgtgtgtgtgtgtgtgtgtgtgtgtgtgtatgcatgcaggtttgtttgcatgtgttaaatcaaacttcttaaatgtggtattcaaatcctctatactaattttattttctattttatcttgtaacttcaatcagagatgtgttatatccccctgctgtgaaatttggacttatctatttctctaggggaatatcagttttcctttaaagttttgaacttatgctgttagatgtgtaaaacttatgatatttatattttcttattggactgttgatttgtaaatatgtcaactcacttaaagctgtttgctttgaattcttttttgtgccactgccaacccagctttttttcgttagcatttgcctttaatttcaactttcttgtgtcatttttataaatgtgtggaccttaaaatagaacgtggttgatttgttttaacaaatcttaaaatgttttctaaaagatgagctaagcacattaatatttactgtgtccactgaaatcttgaaatcttgcttcgtgtgttttttattcaccatgttatctcattgtttcttttgtcttccttccttggttttgttagatgcatcatttacctttttctatgtttgtgttttctaaattgaaaatgatacttgtatttctattcttgtttcctttttcactttaacataaatgttcaaacttacactttttaaagcaaagattaaaattactaagccatctgtctaaagacataagcctggcgtggtggctcacgcctgtaatcccagcactttgggaggctgaggcaggtgtatcacctgaggttgggagtttgagaccagcctgaccaacatggagaaacaccatctctactaaaaatataaaattagccaggcgcagtggcgcatgcctgtaatcccagctactcgggaggctgaggcagtagaatcgcttgaacccaggaagcagaggttgaggtgagcagagatcacgccattgcactccagcctgggcaacaagagtgaaactccatctcgaaaaaaaaaaaagaaagaaaagacataaactgtgtttatatcatctaatttccacttctgtgccccctcctaccttgggcaactctcatcttcccctacataatgtgcaagcatataaacatagaattaattcatgggcagaatttgtatattgataatatccttaaattagttttctattgtacgtgtactttaataatcaatacctattaaaactttccaataatattgagtaaataacttagcattactttctgcattttattacttcctcctggcttcatttcactacttgctgaggcaccttctccagtaactcttttgtatacatctctccagggcaaatactgtgagtcctcatagatctaaaatgtccttatgttagtttcactcttgaataacagtttgtctttttatagaatttggcgtatgaagtgacttggagattggtctttgggcccaagcatggctcttaagtttcagagatcaccagccagtgggttctgcctgctctctaatgtacrctctcacacagattttttccacctaaggcagatgcgtgtgtctaaggtgtgcgtgtgtgtgtgtgtgtgtgtgtatgtgtataggcaatggatgcatgaggttctatctttcctggctgactgaacattgaatacacaggaagtgttcagtgctgctgcagaggaagagtgggaggtgcagaactgttcaaccatcagcctaatgatatctcacactttactttcccatctgctttccattagaggataatgatgttgactgtgcacgtgtaagatgcctttgatattttgcaatagtggactcgtcattgaactgcatactccctcatctgatcacgtttaacacaataatttcaacatggacacttgaaaacagggtgtcatcagtggctatatattaccacgccctagtggggcttgaacctctttagataaggatgtaatgscctaaactaattcattctctttgtatcttatacttccttagaattttttccttcagactgtgaattcattgttatttgatgccactttgcaccatgctcatcttcttactgagctccactgccttcctttggcttaagtttgcaggagtggtggaagaagaagactataaaaagatattggtggaaattatcaggggaagtatggggaatataatcattactaatgtaaggtgattggaaacaaatttttatttgatggtttgttcattcattgagttagtatttattgaagatttcttatcgtcatacccagttctatgtgctggggataaattagtggacagacagtaaagaagaatgcagcctcagagtttgtactctactgacagagatcctagtttgagtccgacacttgtatttacaatattccatyaaatcacatagttgcatctgaattcagatttatttagggtatatttatttttcattgaccttttgcactcattttccktttgatcttctattgccatgtagtgtggggaaatgctatgagtttttgaaaaataaatgcttcattaaaaataatggactcattttcacattgcagccaaaattatctattaaaaacataagtttgattgtatattattcaatatattttaatgatttgtcattgtttttasgayagaagtaaaacatttgatatggcctctcggcctagcatgtcttcctgcttctccctctaccttatatcatgctattaccccctcactcttggttctgctcattttgctgttctstcagttctcaaacttgcaatacttcaatccaatctgggccctgttagctcagccgccatagtcctctttctcctcattgcagcttcaagccctctgccctaatatcttgctcatccttcaaaatcagcttatgtatctattctctaggaatcattatctgaggccctacttaatcaaatctattaatagttctcatcatagcctattctgcttcatattgcttatcacgtttgaaatgaataattagtcatttatcgtttgtctctgtaggccataatttccatgaggacaggaactattctttttcatgatcattattttgttctcagaagttagtataggttggcctggggcagtggctcatgcctgtaatctcagcactctgggaggtcaaggtgggtggattacttgagctcaggagtttgagaccagcctggtcaaatggagaaaccctgtctctacaaaaaatataaaaattagccgggatgatggcttacatctgtaatctctgctacttgggaggctgaggtgggaggattacttgaacccaggaggttgagcctgcattgagccatgatgagccactgcactccagcctgggtgacagattgagaccctgtatcaggggraaaaaaaaaaagaacttagcttatatcacaatatattataatcattaaagatwctcagaaaatattttttgacaaagtaattaatccaatttttcagcaaacctggtatatgcaaaacactatttctgtgtactgaagtagcatattaaagctcccatagtccaaaatggactcagtcatattttctcttgaatggaaaaataagagaagtctaacttcagaaaaatgatgaaatgcacattaaagtatgctcttgtgtgaaagatgaaatgagattctgaggaggagaagttctttggtatttcttgagttttctgatattgacttgcccaaactgaactaccgtgtaaaccaagggccccttgataaaatgatctctcagcctttgttcctttcattttgttttactttcaaaaagccctctggatattctgtcgaaactacaaagtggaaattggttagcttcatttaacaccatatcgtgcagcaaaggcctcacatcaaggcccttgtcattttacattcttcttatttcaatagttttcccaacttcaaaatcttagagttgtagatagccaaagacttccatcctaaatccttcaagacctaattctttgattatattaaaatcccagtgttctagcagccataggaatataaacttttctctgattcttcatcccaggactctgatgaaatcacactgatgaaatcaggagggcctttggcaacayatactgactctctgggtctttagcagtggtggcatttctttgccttggctggcactatcttatgtgctagttgtaatttgaaatttaaatggcaataaaagttttcagattttcattgaaatttcaaaagaataagacaggaaaccataaagtaatttcctcataggaaacaatgttataaaagaacaaatcattattgctttgatctattttgtttatgaatatggaagcctgtgggtggagtttgcagttttcatatctagttaaagaagctataaactttacaggtgggatttgtcatagattgtggaacaaaatatgcacattttaatatatgccacaggtattacaccaagaagcttttcctcttgttttactgataaaatctccttctttgatgtttgatagattttctaccagaaacatgtttgttttgttgaattgttagtccagaaatacagcattaggtattttgatgaccaaaataatagtatttcctatcaacaactctaaatatttttctttttaatttataaaataatattttatgttgcctttatttatatttttatagggaatgtattacctgctagatatttagcataatattttgtaaaacttatggtctgtgtatcctagttaaattgaggtttgaagtaatttgtgtatgatcagctaggtcagaaaccttttcattttaatgctgacgtgggatggtcatgtcaagaattacttaatgacctcacagaactggaaaaaggggtcagtaattatatttacattgtaagatctatatacttctttatttattaaattgacgtctaactcaagtcaggagattatttatgtcctgttatagcttgcagacagtatatcttgctatcagtgtgtcttcagctgaattagcatttcagtgttgtctatttttagttttgtgataacggcatttggagctttgtgtaatttaattgtcaaaactcgaccatttctttaatttgttactgggcagttcatcaggcagttttgtaaagtattattatgaaaagagttctagccctgcagaaactctcctgaagccaaatttcatttaggaatagaactgttatacatttaaccatgtaatggaaaacatccttgcatggggagtttcttgtgtagtaataacagaactaaaagaagtgaaaattaaataattaccttttaccaagtaactgccatggaccaagccctgtgataggggtggaagtggtgtgatttttctttctttctttctttcttttttttttttttaagacaggaktctcactctcactctgtcgcccaggctggagtgcagtggcgcaatctgcaacctctgcctcctgggttcaagctattctcctgcctcagcctcccaagtagctgggactacaggcgcccgtcaccatgcccagctaatttttgtatttttagtagagacagggtttcaccatgttggccaggatggtcttgatctcttgacctcatgatccacctgcctccgcctcccaaagtgctgggattacaggcgtgagccaccgcgcctggccggaagtggtatgatctctaatcctcacaacaaccgtaaaacagctgtgatattaaaacagtctcaattttacatatgaaacgtagaaataggcacagatttctttttgttctttttttcatgtactcttttattattattattattattatactttaagttctagggtacatgtgcacaacgtgcaggtttgttacataggtatacatgtgccatgttggtgtgctgcacccattaactcgtcatttacattaggtatttctcctaatgctatccctcccccagcctccgaccccacgacaggccccagtgtgtgatgttccccaccctgtgtccaagtgttctgattgttcagttcccacctatgagtgagaacatacggtgtttggtttcctgtgcttgcgatagtttgctcagaatgatggtttccagcggcacagatttcttaagtaagttagctatagtcacctagctagaagatggaaaagcctagcattgaagctgatgggtctatgacatacatctttcatctctttgtgccttaaattttatggcatttatttttgctacggtagtttgtttctccactcatcaactgttgttttggtttattttattatgtagcccaaatgtggaccctttcttagatgtcaagttaaaaaattttgctccttggaaataatattaagaactttgttaagttataatcaaaagtattttttatcatctttcatattaaaaggcaatcacatcctttattataaacttttaaaagtctgtttccagatcagcaaatgtgaatttcagacaaatgtgctgtggaaggcgtactaatagccccctaaagatgtttatatctaatccctggtaccagtgaatatgctaggttacttgggaaaagagactttacagctgttgttaaattgatgacctttagatgggaagattatctatgggtgggcctaatgtaaacacaagaatccttacaagaagaaaatacyagcacaagaggaggtcacagtcagagagggattcaatgatgctactctgatgcctttgaaaatgtgggaaggacccgggagccaaggaatgtaggcagcctctagaaacgaaaaagtaaaaagaaactgattctcctccagagcccccaaaaggaatgcagccctgtcaacaccttgattttatacctagtaagccctgtttcaaacttctgacttccagaaagggaagataatacatttgtattrttttgggtaatatgttgtagtaatatatgaaactaatacaaatgcaattgatttaattttaattctagatgtggaatcaggcttcaatttaagccttttctgctcagtgggagcccagaaattctatgcagaagattcttaaggccagcaaggtgactgaaatggggtggtgctgggagagtatactgagttgccttcatatagcaaatcacttttcttttttaaattaaaatgaagccactgtttctcccccctatttatttatttatttacttacttacttatttttgctttgattttatcttactagcttcttgatttgggggacagtaaaatcgtacctaagtttcttcctgactaaagggtgttatgagtatataatttggtaatgtatgaactcctggtagagtagttagtatacagtaggctgcccaaaattgatagtgattctacaaagtatgtcatattctttaaagattctaaaagtatgtcatacatgactccaggattgttgtgggtatattgagaggtagtcagtcacaaaacacgatgtgaactctgaagtactatgcacgttttagtttccttattacattatcaataaactggatgcaaaatatcgaaacacacatccatgcagcaaatgacacttattttagtgatcaaatggtcactgttaatgattcacttcttcctcaccaatcttgtccctgaacatctaggcctaggaagttttcctttgaccatcttgctgggctcttctgctggggtcctaggccctgcttccttgtgatctgggaaagcagtccagagactgttttatcaggtgcaatcctagctgattgattcccaggtctctgaagttaaaaaataaataaaaaatgcttcctctaactcagtctcaattgtgactcgtttttatgctgctcagtagaaaggacatcaactaccattctatttactacctccacgagatcaattgttttttagctcccacatatgagtgagaacatgtgatattgtctttccgtgcctgacagatcacctaacataatgtcctccagttctatccatgttgctgcaaatgacaggattacctccttttttatggctaaataatattttgttgtgtatgcgtaccacattttctctatccattcatccattgatggacattttgggattggttaatragtacaaaaatacaattagataggaagaataagatctagtctttggtagcacaattgggcaattatagttaattaatttattgtatattttgaaatatctagaagcaaagatgagatggggcaaggacccctcataggggcctgctgctgcccctactgaagtataagaataaaggaaaatattgagtgtcttcaagggaaatttcaggcacctagatagccttgagaagtaaatgatcaacctgataagaaggtaatagtagctgttgttttgttttaagaaacaatagccacagaaattagagtcactaaatatttgattccctatggaaactaaagataacatcttaatatatgtctctgagttgtctctcagaaacccagaccccaccagatggatccactgtcatgtagacctcagataagagggaagtaaggactagagtctcgaccactgttcttcgttttaaatttcttccttaggggcctagaggaagtcatacccacaggccagacctaacatttctttctgctgacccaaaatttttaaacaaagcttttctcccttaatcaattgcaaatcagaaagtctttgaatctacctgtgacccgaaaacccccacttcaagatatcctgcctttttaggacaatccaatgtatagcctccaggtattgatttatgactttgcctgtaacctctgcctccctgcctttagaagtccttacatgtaagccatcagggaggtcaagtcttaagcatgacctgtctgattctccttgcttgacaccctgaaaataaatactttcctttttcctactgcaaaactttggtgttggatgtttggctttactgcaccaggcaagtggatgtcagttcatttcggtaacaaagatttggaatgytcccaacataaagaaatggtaggtttttgaggtgatggataacccaattagccagatttgatcattatmcattgtatacttgtatcaaaatatcacatgcaccccattatatgtacaactattatgtatacataaaacttataaataaataatgaagagaaagaacattaactgtggaatctgatagatcaaaactgcatttgagttttctcacgctagctgcatagccttgtgtaaattgtcttaacctttctgaaccttagttttctaatccatgaaatgtgaatcataacgcctacctgcagtttttctgtgatgtttaattgagataacatatgtaatgcatctagcatgggggcttgaccttagcaggcatccaaatatggcctatattttgcaaaagcgttcagggatttgaagcactagaaacaacgttgaattagttttcaacattgaaaactgtttctctagagccttagtttgactaattctatgtaagttcaaagggtaaaattgggaacctagaattaacartgtatgttttcaatcttaaaagaggcaattttttctttctttttttttgtttgtttgttttttgtggtattatggagatatagtggtcagagttcaaaggactggtctaaatttccagaaaggccaagattcccttgtcaagcacagttgcatttttaatgagtatttcaatttgccttgccacgtaaccattttctctactgtgagattaacttcaattaaagtcttttgtggctatgttctttcttagatttttccgtctaattggtctccatgcatttcttctgcattagcactaatttacttgtgcctatgattgcagtcagaacaaagctgaacttttgaattttagctatgagtcttttcatcctagatattttagaaatttaatttattattaagccagagaaagcaaaaccctgtaaaaatttatatgatggttataactgacttggttcctttcctagagctgaaaggtttagagaaactcaacatctgaaatattgattatacaggattcatcattttctctctctcataggaaatgaaagcttctgggcaagagaaaatgcactgcagtgttgtacaagtctctaatattgattgtggttaagggttgtaaagtattgactacatggatttaaagtcttatggacaatgaatactcacacttctgtcttgaagtgaaagagagaagaaatagaaagtgggtcactgaagactgctgaaagtgccaattagtgaccctagtcattacttcccgtaaagaaaagtaggaaaacctaaagagccctgtagattggattcacagggctttggsgtaccatcaaacaaggtgcaattgctgctttacttcataaagataataagcattcaggaaccatgaagaggggaaaataaactatgaaaaaagattatatagacatcaaggagatgttaccaaggagaccagagtgcaaagcaataagacagggtgtttactggggtcttaggaattgcaattcaggagaccagatgcaactagaaggcaagttgtgtcccaaagaaaggaaggagaatgggaacttttaacagaatgctaaaagtgatcacataagttattttgaaagaattatcaaaataatacctgactccatagttcattggttgtcactgctcaggagttgcagcagtggcaaaagtcagccgttttccaggatgttgtggtcatggcagtttggcccacttcaaaggtttaagacaagctcctgctgagacaaccaagtaaaaaggggtccccagagaatcgccaactagcctgcacactgtaaggatggggtagagcctcaggaaattcctgacgtttgcagtggggaggagcctggcctctcctgttcctggatagtaacttgggatttaatccattgaggtggagagcctgttagcaggactccatctcactttgctgagttgtatttccttcttccttttcacttgataaattccactcctcacccttstatgtgtctgtgagcctaatctttcctggtcatgtgacaagaactggtttcttcctacaacactgctttacaaggttgcagatcatgcaggtggtctccctggaatggtttcttgaccccattttagaactctaaaccagaatgacaacattttttacattacatttcacagagaacagagtgttctcaagtatggaggaagaaaaagtggagtctttatgaagagatggacctttcagcttctgaaatccatagttggccctccaggtgtgcaaggcattataagtaatatatggacatgtgtttataacattggaatgaggttgggtaacatctgaaaagacattcttaatttgttggcataaataaaacaagcaccatgttggttttcatttatacctcctcaattaggaggtaatagtttatactatactttttaatagttaggtaatgtgtaggcttttcaacctgttgacctgtaatatccctgtattataacttgtatatgtttacaatgtcactgtaatatcatttgtagtataatgtgaggtcctatttaaataaagtaagatatagagaaaaggaacaagatgggatttttaaattgatgagaacctcattcggtatgcttgttccacagttggagaactctgtacactgacgtagttaagtgacttgccaaagaggaggtaaggtgagtggcagagctgccattagatctcaggctttaaaatctacaatccaatgcccttagactacacttactggaaatacttcagtgtaagcatagaaatctttgtgatatctttaaaaacatgcattaattgagcagatcattatgtttcagacactgttccctgtgagcataatagacaaagatccctgccctcctaaagcttagatcctagtggaaagagatagacaatgaacacagaagcgtgwaaatatgttacatgtcagattgtgatgagtgttatgaagggtgataaagttgtaaagggaagaagggagattttgagcaaaatatgagcaagttgaggcctttaggggatatatatttcagagagaaaaacaaaagtttctaaagaaaaaaacctacttggtaaatttgagcaattgcagggagaacagtgtgactggaccagagtgaatatgaagaagaatgacaagagatggagacagagataacacagagctagattatatggaactttataggcaattttaaggaaatttggggctttgtttgatgtgatgctttgttttgtgtgtcaatttgagcaggctatagtacctaattatttaatgaaacactaatctaggtgctattggggagttattctaggtgtgactaacatctacaatcagctgactttaagtacaggagattatccttgatcatactgaaacaggagagttctctgctccctgactcccctctcaggatgtgtgacagaagtgttgctcatctgtttggccaccactgctcaaaccccttacaggagggggagcatgcaaatgggcaggtgcaggagccagggaaaatgtgtctggggtccagccctatggtggcatctagggatgtgggtatgcgactctcaaagccccagtaggtgtgctaccatgttctttcatctctgccatccacagatggcttaagtgtcaaccagtgccctcttggtatcacacatggacttgaaggatagtgaatatggggattttattggatgatggagttggctcttaatgggacgggtggggaactggaaaggggatggagtgggaagatgatcttcctctggagtttggctgttccacagctgacctcctctctgactgtctccagctgaactcctctcgacgttcagactcttctcttctctccttctctgctgagctgcttctctgcctctctgctcttctgtacatctgttcatctgctcrtctgctcatggaccctggagtttggggtttatatgggtacaggatagggaagtgtggtgggccaaaaggcaacattcagtcatgaaaacaggaatgcttgttcccatttagggctgtgggcttccaggcttagggtcagggcatttgctggggaactgccctcttttacccagtatttccctgtttcctgtctgtwtcaatatggtgggtctccaggatgaaaaggccttaagagcaaaaactgagatttcctggaggtgaagaaattctgccttaaaactacaacattgactcttgcctgatttctagtgcaccagagtgtcctttagatttcagacttaccagcccccataatcayatgagccaattccttaaagtctctctctctgtattatctatctatctatctatctatctatctatctatctatctatcatctatctatctatctatctatctatctatctatctatctatctatcatctcctactggttcaatgttctggagaaccctgaatggtacatgtgagatgggaaactcttctagggttttgaccagagaagaaatatgatgttgcttaggttaagaataagctgtggaggttcaaggctggaagcaagtgacaagttaagagtgctgtaaaaactcaggggaggaatgatggtagctttgcactagggtagtagcaatggaggtcgtaaaaaattgcagattctgaatatatttgaagttaagtgaacagggtttgaygacagattgatggggagtataaaaacaagaagtaacaaaattaagatttttagctgcaagtagaaaaacgaggttgccacggactgaattgggggttttaaaagatcaattttcatgaagggagaaggccaasattcagtttgtacatggcaaatttgaaatacccattaaacatccaactgtagatggggagtaagcagctggacaaaacattccaaagttttctgagagatctagacataaggtacaatatggagatcctctgagtatagataatattgtagctttgagagtagctgagatattttaataagtgtatagatagaaaaagaaatactatcccaggacttgaacctgagtactccaacattaaaaatatataagatggaagaaaayagcaagagactgagataaggcagctaatgtgatgagaggagaaccaaggaagarggagacytagaagataggtgaagaaggcatttgagaaaatatcaactatgacaaattctgtttataggttaagatgagaactgaaaattgattgttgatgcccttcaccagagctgtttcagtgtagtagaaacaaaagcttgattggtgaggaagagaagagataaagtagacagagatatgctatattctagtaaacagcaatatcctatatgcttttaggaagtcgtttctcttggaagataaaacatcacatttctatattgatgtggataatttagtggggagtgaaatttatggcagaagaaaggagagcattgctgaagctacatccttaaggaaatgagaggggaagggaaccagaacatcggtgggagatttggcttatagaggagttaaggcagttcatctatggcaatgggagggaaggcagttcctttaatgacaatgggaatggaagtgtacatataagggttcaaatgtaggcaggttgcagaaatggaaatgggagcatgtaaaaaacttctgatggccttgttcttctaaatgaaagaaaataagactataagctgagagtgagcacacataaggaggtgttaaaatttgagccaacagaagactgatgtagtcatccaagtgtggagagtaaaaatacaaggaaaatgtggcagatagaaggaggactgtagtcttctygcagagctgttggcttctgtctctactactgaagatgaatgtggaaaattggtacattttcctttaagtggatgtattttattttgctgatttgtaaggaaacagcaaattgaagccagaattagaatgagttctggtaaatgcgattaaaggtaaaatttcctcagatttgttatacctctaaaaattgtgttaatttctaaaatgccactaaaactttatggtcatgtatttaagcccaatatgatagaactaaacctcaatatagcaattaggatctcttccaaaccccaagccagaagttggtttgggagatgttggtggcaggaaaccaatatcactaaagacatcagaagacattaagtctcattcaggctcatgattgtgaaaatgtcatttgttataattcagtctaacactatatttctgggaacaatctgtagtgggaatttttacattcacatgcataaaacaatataggaggtttggggaaaatgtatccttagttatcatattttccagtgatatgttgtcaatactctcaaatdgagtcatcaaagaacaagttttggcagcaatctttgaagataatgcttcctttagtacattgccaaacttctcctttaaaaatgaaagaacaacttataattatttgtgacacttgtgaaatgataatggaagctttgaatagttttgctcagaattcacacctattcaattccacatagagttgttaaaataaatgagaaatacagcctcaagaacaaagacacatgaattcagacagagcaatctaagaaaatagggttttctttttaaattttcatttgaatgacactaagaaaaccaaactcttttaaaagtaatcattggtgtttactaaaacacatttttcactrtgctgaacatacgcccttgaggtaaaaatatttttctttgccaaaaccttgagaaagttataattgactaataattctctgctttggaagaaacacaaccatcaatatcaaagcttgtataatcattacaacttttgctgtaaaatagtgagattcttaactaaattttagaggcatgatattatcattttggagtcttttcttcattgtattctttctggaagaaaacattatagttcgtctttgatgaatagagcttacattatgttcctaagagatagtgatgttttttacagtggcggctgtcgatgtgtgctgcttagatttttcttccaggaagaacttgcatattcacctgaaagaagtgcagttagctgacagcttccagctgttagcaccttcaggattcacctcagctttcaagccaagacaatgatctttctgggcagcccccagccaattactggatggggatactctagacctggccatttctgcccaacatgggactcctctcatgggtactcattgttctggagctccagattcattgctctgggttgtagatctgtattacaggctggaagctttcaatggtcagttcagcttcttctgctttttatctttcacggatgttacctctgtcctccctgccccccatgaactccttgcactccaatcaaaactctatctcaatgttttcttcccatggactcaattgacagtaatccccctcaaatgtgttgggccaagtactgtgttattaatacatgccgggaatacaaacgtcacttaacacatattttctatcctaaaaagctcacaaactaattgggaagcaagcacccactataagcataaagtacaaaggagtcaacataattatgaagctatggagttgaactggtctttgattgctttgtgacaaatcaccagaaactgagcaccttaaaacagcacgtatgtactatcttggagttctgtaagttatatgtctcagcaagcttgattgaagtgtcttcttagggtctcacaaggccaaaaatcaaggtatcagacagtctgggctcttatctggaaggtctgggagagaatccacttcccagctcattcaagtttctcgcaggatctagtcccttgtggtggtacagtaggcctgaggtttttgtttccttgttggctgtcagctgggggtcactctggcttctagaggcccgccctgttctttatcatgtggtcccatgccatttctttaagtcagcaatgatgctttgaatccttcccattcttggactctcactgacttcctcttctgccaccagcaagagagaactctttgctatttaaagggctcatgtgactggattatgtcccacctagataatctcttcttttattaactcacagtcaactaattagtaactttaactacatctgcaaaattacttatattaattaacataatctgaatgaattcttatcatattcacagtcctgggaattaggcagaaaatcttgtgggatcatattaggattgtgcctaccatagaagcatagagaaagggttcaggatgatgacgctgagaaggcagaaacttccaggggtagatgattgttgacctgaatttttaaaaaatagcaagaaggtcaaatgggggcagttttagccaagagttagttggaggtttgaaacagtgtagggtgtgccaggatatataagtagaactattgctgaagactactcagagaatgtcccaaaattttaagcttagagattagggttagttgttgggaaaccataagaggattttaagcaggtgattgacatgtgtgttggagagtgatttggcacaacatagaaggtagattttacagagtatcactagaggtggagatcaaatagaagccataaaatgtatgcatctgagagagagtgattgtctaaatcagtacatttgcactagaatggggaaaaggagaagactgtttttaatttagaaggtaaattttgtagcacttagtgatggactgcaaatggaaaatgctagagaagaggcactctgtggtgacttttggcttaggagactgtaggtggaggatctatacattgatttggggatgaaatccggatagacagattgaagggaggggagagaagtgggatgatgagtaattgaatactggaagtgttgaatctgaagcagttgtagaacatccacatcatcaacttttctctttctactgaatcagcataaaagcatcctcttctatttccgttaaatacaaaacaagaaaacgtccctgaatccctcattgctctccagctaccagcttaaattttcttcttcttcatccctaaactgcttccacatatcatctcttttcattcactttccttttacttttcaatgcttctttagctttgcttcctaattcacctacctactccattgaaattgctttgtcaaggtcagaggtagctttcctgttgccattgtcctcaatttattcagtgacccagcagcatttgatagaattgacctgctacttaaatccacaaattgacttagcagtacatagtgcaggcctaaaaaatgagaaagaataatcacacacaaagttcactgtagcataatgaaaataacacttaaacacaaccatttatttatggcatagtctcattgtgtcttctagtcagaaagttaaaatattatgctgggcagttcaaactatattcatcaaaattatgtcgtttttttcctaacttagaagaatattttcttatatcaaaagttaaagtctttgcctatacttggatcttgctctcctttcaaacatgcctgaagaggtgaaaaatgttatcaagttttcaaaacaggctagtcagagkcagaggcagaggcagaggtgagagtgaaactggttttgaggtcaagtaatccattgatttcactgctccacaaattttgttctcactttctttttcacttagaacttcatgtaaagatacttaccaaatttccatttattatttaaatcattatgaaacattgcagacatgcagaattacataaaggatagacagataaatagaatatgcatattcccactatttaagaagtaaaataatcaaatttttcctgtagaggaaactgtcaggcctctgagcccaagctaagccatcatatcccctgtgacctgcacattcacatccagatggccggttcctgctttaactgatgacattccaccacaaaagaagtgaaaatggcctgttcctgccttaactgatgacattatcttgtgaaattccctctcctggctcaaaagctcccctactgagcaccttgtgacccctactcctgcctgccagagaacaacccccctttttccttttcctacccaaatcctataaaacagccccacccctatctcactttgctgattctctttttggactcagcccgcctgcacccaggtgattaaaagctttattgctcacacaaatcctgtttggtggtctcttcacagggacgcgcatgaaatttggtgccgtgactcggatcggcggacctcccttaggagatcaatcccctgtcctcctgctctttgctccatgagaaagatccacctacgacctaaggtcctcagaccaaccagcccaagaaacatctcaccaatttcaaatccggtaagcagcctcttttcactctcttctccaacctccctcactatccctcaacctctttctccttccaatcttggcaccacacttcaatctctcccttctcttaatttcaattcccttcattttctagtagagacaaaggagacacgttttatctgtggacccaaaactctggcgctggtcgcagactgggaaggcagccttcccttggtgtttaatcattgcaaggatgcctctctgattattcacccacatttcagaggtgtcagaccatgcaaggacacctgccttggtccttcatccttagcggcaagtcccgcttttctggaggaagggcaagtaccccaaccccttctctctgtgtctctaccccttctctgcttttctgagggaggggcaagaacccctcaaccccttctccttcacccttagtggcaagtcctgcttttctagggggcaagaacccccaatcccttatttccatgccccaacctcttatctctgtgccccgatcccttatttccatgccccgatctcttatctctgtgccccaacccctttctcacttttctggagggtaagaacccccaaaccccttccctccgtgtctctacccttctctttaaacttgcatccttcactataggcaaccttccaccttccattcctccttcttctcccttagcctgtgttcttaagaacttaaaacctcttcaactctcacctgacctaaaatctaagaagtgtcttattttcttctgaaatgccgcttgaccccaatacaaactcaacagtagttccaaatagccagaaaacggcactttcaatttttccatcctacaagatctaaataattcttgtcgtaaaatgggcaaatggtctgaggtgcctgacgtccaggcattcttttacacattaggcccttcctagtctctgttcccaatgcaactcgtcccaaatcttccttctttccctccctcctgtcccctcagtcccaaccccaagcttccctgagtctttctaatcttccttttctacagacctatctgacctctcccctcctcgccaggccgagctaagtcccagttcttcctcagcctctgctcctccaccctataatccttttatcacctccccttctcacacccggtccagcttacagtttcgttccgcgactagccttccccaacctgcccagcaatttcctcttaaaaaggtggctggagctaaaggcatagtcaaggttaatgctcctttttctttatcccaaatcagatagcatttaggctctttttcatcaaatataaaaacctagcccagttcatggcccgtttggcagcaaccctgagatgctttagagccctagaccccaagaggttaaaaggctgtcttattctcaatatacattttattacccaatctgctcccgacattaaataaaactccaaaaattaaattccagccctcaaactccacaacaggacttaattaaccttgccttcaaggtgtacaataatagaaaaaagttgcaattccttgcctccactgtgagacaaatcccagccatatctccagcacacaagaacttctaaacgcctgaactgcagcggccaggygttcctccagaacctcctcccccaggagcttgctacaagtgccaaaaatctggccatcgagccaaggaatgygtgccgcccaggattcctcctaagccatgtcccatctgtgcgggaycccactggaaatcggactgttcaactcacctggcagccactcccagaggccctggaactctggcccaaggctctctgactgactccttccaagatcttctcggcttagtggctgaagactgacgctgcctgattgcctcggaagccccctagaccatcacagatgccgagcttcaggtaactctcacagtggaaggtaagtccgtccccttcttaatcaatatggaggctacccactccacattatcttcttttcaagggcctgtttcccttgcctccataactgttgtgagtattgacggccaggcttctaaacctcttaaaactccccaactctggtgccaacttagacaatactcttttaagcactcctttataattatccccacctgcccagttcccttattaggctgggtcacttcaactaaattatctgcttccctgactattcctggactacagctacatctcattgccaccctttttcccaatccaaagcctcctttgcatcctcctcttgtatccccccaccttaacccacaagtataagatacctctactccctccttggtgaccgatcatgcaccccttaccatctcattaaaacctaatcacccttaccccactgaatgccaatatcccatcccgcagcacgctttaaaaagattaaagcctgttatcactcgcctgctacagcatggccttttaaagcctataaactctccttacaattcccccattttacctgtcctaaaaccagacaagccttacaagttagttcaggatctatgccttatcaaccaaattgttttgcctatccaccctgtggtgccaaacccgtatactttcctatcctcaatacctccctccacaacccattattctgttctagatctcaaacatgctttccttactattcctttgcacccttcatcccagcctctcttcgctttcacttggactgaccctgacacccatcaggctcagcaagttacctgggctgtactgccgcaagtcttcacagacagcccccattacttcagtcaagaccaaatttcttcctcctctgttacctatcttggcgtaattctcataacaacacatgtgctctccctgctgatcgtgtccggctaatctcccaaaccccaaccccttctacaaaacaacaactcctttccttcctaggcatggttagtgcagtcagaattcttacacaagagccaggaccgcaccctgtagcctttctgtccaaacaacttgaccttactgttttagcctagccctcatgtctgtgtgcagtggctgccactgctttaatactgttagaggccctaaaaatcacaaagtatgctcaactcactctctacagttctcataacttccaaaatctattttcttcctcccacctgatgcatatattttcttctccccagctccttcagctatactcactctttgttgagtctcccacaattaccattgttcctggcccggacttcaatccggcctcccacattattcctgataccgcacctgaacctcatgactgcatctctctgagccacctgacgttcacctcatttccccacatttccttcttccctgttcctcaccctgatcacacttagtttattgatggcagttccaccaggcctaatcggcacacaccagcaaaggcaggctatgctatagtacaagccactagcctgcctcttagaacctctcatttcctttccatcgtggaaatctatcctcaaagaaataacttctcagtgttccatctgctattctactacttctcagggatcattcggccccctcccttcctacacatcaagctcagggatttgcccctgcccaggactggcaaattagctttactcgacatgccccgagtcaggaaactaaaatacctcttggtctaggtagacactttcattggataggtagaggcctttcccacagggtctaagaaggccaccacggccatttcttccctctgtcagacgtaattccttggtttggccttcccacctctatacagtccgatagcagaccgggctttattagtcaaatcagccaagaattttttcagtctcttagtattcaatgaaacctttatatcccttacagtcgtcagtcttcaggaaaggtagaacagactaatggtcttttaaaaacacacctcaccaagctcagccaccaacttaaaaaggacaggacaatacttttaccactttcccttctcagaattcaggcctgtcctcagaatgctacaaggtacagcccatttgagctcctgtatagacactcctttttattaggccccggtctcattccagacaccagaccaacttggactctgccccaaaaaacttgtcatccctactatcttctgtctagtcatactcctattcaccgttctcaactactcatacatgccctgctcttgtttacactgtcagtttacactgtttctccaagcgatcacagctgatatctcctggtgctatccccaaaccgccactcttaactcttaaagtaaataaataatctttgctggcaaagctatgctgaacctccttaggcactctctaaatgtcctaggtcctcccaattcttagacctttaatacctgtttttctccttctcttattccgtttttcaattcatacaaaaccgtatccaggccatcaccaataattctaaatgacaaatattccttctaacaaccccacaatatcaccccttaccacaaaatcttccttcagcttaatctctcccactctaggttcccacgccgcccctaatcccactcgaagcagccctgagaaacattgcccattatctctccataccaccccccaaaaattttcaccatcccaacgctttaccactatttcattttacttttcttattaatataagaagacaggaatgtcaggcctctgagcccaagctaagccatcatatcccctgtgacctgcacatacacatccagatggccggttcctgccttaactgatgacattctaccacaaaggaagtgaaaatggcctgttcctgccttaactgatgacattatcttgtgaaattccttctcctggctcatcctggctcaaaagctcccctactgagcaccttgtgacccccactcctgcccgccagagaacaacccccctttttcctttacctacccaaatcctataaaacagccccacccctatctcccttcactgactctttttggactcagcctgcctgcacccaggtgattaaaagctttattgctcacacaaatcctgtttggtggtctcttcacagggacgcgcatgaaagaaactattaatacaattttattatttatcaatctcatttatttctttacatttttgctaaatgtgtatgtattcctaygtagtatatagactcattttgaatgtttccatttctatataaatgaaatcactgagtatataggtctttgcctaacatatttgtgatttatccataatgaattttcagttgctaagaattcattttcactgtcatttaacatttgatatatgataatgtcaaattttatttacctgttcttttgataaacatttaagttgttaatatatttttctattgttgctattttaaaaatgtctccttatgaaagtgtatgatcatttctttgctgtatatacctataacgtgctttctgagtagcaggtataataaactcatcagatttgctagatattgctaattgctcttagtagttgccttccccagtggaataaaaaaaatcttatttattattcttatcaaaacactattttcagagatttgaagtaatatctaaagttagttttcatttgcacatccctctttgctactgagattgagcatctattcacatttaatatttaccagtttatttaccttttttatctactgcctgttcatatcttttgacattttatactagattaatttttatttttctttattgatttgtagaaatccttcatctaatctggcaaacacatgtggcaggtactgttacatgcttactcaatacccatgtaatttaccatgttctctaaaactgtcattatgactcttagtaatttgttttccatgctaattttataatgagcttgctacactataaaaaatgaaaacaaaacaaaactttggtgaaacatcatctgagttatgttgaatgcatagattaattttgaggaaactgccatcttcacaatattgaatttccatgtctttgaaattatctctacttatgtacatctttaatttctttcaataaaatatttyaaatgctgtgcatcattatgacacccattttttaaaatttatttcaagataatttttacttttggaagttattctaaattaaatactttaaaaatttattttatggaccagtttgttgctgaagtattgacattaaactaattttgtttgttggtctgttataaagcaatcttgctaaaattattagttataataattgttaagtctcttgattttgttatgtagagcatcatattctggcaaataatgccagatttgtttcttgctttagaaatttcctattatttatttcgtgctgtgcttgctggctagatccataaaacaatttaaaaaaagactgataagtacctttgttttgtttctgattttaaagacattatacctaatatttcattattaagtgtaatgtttctttattcttttggtatatctggttcaagaactttctattcctagattcctagagtttttaatcataagtgagcagtgaattttaagaaagtctttttctgttactgagatacacttttttctttttatctattagttttgttgattatattaatatattttgtcatgataaaccattctgaatttctgtactgcatgcatttgacttgttaatattttatttagaatgtctgcatgtgtcttcttgaaggatattgcactacaacttaaccttgcgtccgtgttcatgttggtattttctttctaggtttttctcaccgcataaaatatgttatagagtagtccatctatttctcttccatggaagagttcatctggtagattggactaccacttttccttgtgagtatattgattatgtgtccctacctgttattatttgacttacactctctctgtccctgagagtattcctcgtgcattagcgttgggattsgatacacaatttatatgagaaataaatctttgttgttgcagatcactgacacacgtgagattttttgcaactatagcataaatgaactgacacatcattaaaaattaaaattacatttttctttaatgtctgatagaaatcacctacaaaattatttttctcttttaaatgagatttttaaaaagatattaattagtttaataattgtaggtctatgtgggtcttaaaaatttatttctgaaccactttgaataaattaagttatagttgtctagaaaactctccattttgtttatatctttgtcctaaagttgatataaaattctactcatttttaaatttctgctgcctttacatattctccctagtttaaaatttcaaatgattatttcttcctttggtttgttctttattaatcttgctatgcttagttttttgattttttgtttgtttgtttgttttttgttttttgtttttttttttgagatggagtctctctctgtcgcccaagctggagtgcaatggtacaatctcggctcactgcaaccttcacctcccaggttgaagtgattcccctgcctcagcctcccgagtagctgggactacaggcacatgccatcacacttggctaatttttgtattttcagtagagacagggttttaccatgttggccgggctggtctcaaactgctgacctcaggtgatctgcccacctcagcctcccaaagtgctgggattacaggcttgagccaccacgcccggcctttattagtcttttcaaaaagccaactctttatttcatattatttatttaatttcattatctactcatatttattatttttctttttctttctttgtgattattctttttttaaactttatcattttagaacagttttcagttcacagaaaaattgaaaagaaggaggaaagctttatcatttacccctttcccctatacatgcatgaatagcctccctccaccattaacaaagtcccccaccaaagtggtacatttgatacagccattgaacctacgttgacacatcattatcacccaaagtccatagttaatattgactcttgatgttgtacattatgtatgtttgcacaaatgaacaatgacatgtatccaccattataatatcatagagagcagtttcattgcattaaaaaatttttctgttccccacctattcaaccctgcttcctctgtaactcctgtcaacctactgatcttttttaatgtctccatagtttttccttttccagaatatcatatatttagaatacagtatatagacttttcagattggcttctttcacacattcacttgctttccagtttcttccatttctttagaaatatcaagtcatataatccatcatatcaaaaggccaaaggagaaaaaaaaatcatacgattgtatcaattgatgcagaagaaacatttgacaaaatccaatacccgttaatgattaaaaactctcagtaaactaggaatagaagggaacttccttaacttgataatgaatatctgcatattagaactaacatcatactcaacagtaagaaactagaaatttccccactaaaaccaagaacaaggcaagaatgtcccgtttaagcagtatttttcaacagcatactgaaaatgctcgctaatacaatatgaaaggaaaccaaaataaaagatatactgattgggaaggagaaaaactcctaggcctaataagcaattatactaaagttacaagacatgagattaatatataaaactcagttgatttcctgtatataagaaatgaacaactggaatttgaaattaaaacacaataccacttacattagcagccccaaaatgaaatttttaggtataaatttaacaaagtatgtacaagatctatatgaggaaagttacaacactctgatgaacaaaataaaagaagaactaaataattggagagacatttatgttcttagatatgaaccatcttgcatttctgtgctgcatgaatttgacttgatagtattttatttagaatgcctgcatttgtcttcatgtaagacattgcactacactttaaccttgtgttggtatccatgctgggttttattatctaggtttttcttaccacataaaatttgttatagagtagtgcatctatttcacttccacaggagattttatctatggtagattggaccactacccttttctgtgagaatattgataatgttgtatgtccttgcctttcattccattttcatgactctatattgtcaagatgtcagttcttcccagcttgacttatagattcagcgcagtccccgtaaaaatcccagcaaattattgtgtggattgaaaaactggttttaaaatttatatagaaaggtaaaagacccaaaatagccaacacagtgttgaaggagaaggagaaagttggaaggctgacacaactttacttcaagacttattatcaagctacagtaatcaagaaagagtggtactggtggaaaaatagacaaataaatcaatatataagccatccagtctatggtattgtgttatagaagcccgaatgactaagacactacacaatcagagtgtggaccaatccaaatatatttccttattattttcctttattttaatcaacctaactactgagaatgtagccttttgtgttttatgctacagtctaaattaggaatgttaactttgtggattcaaggcaaaatgtcttgtcctctttgtaattattagaaagcaaggcaataagtagcacagaataataaatgacctaagtttgctacaagtaaatgcccattttttacagtggttttcaacatctttttcatttttggctttaaagtttcctttattttctggcagggacaaatgtacattggaaaagattgttaaaatgtattcaccatattcacatttttgtatggggaaggtttttgatgttgtctaatatgaattaagctgaaaatgatagtctcctttcattcttaaactctttacattctgaattcctgctctcacctcagttcttgtaaattttctcaatgatctcatgaataccaaattttatttctgcctctcagtgctcatttgctcatcatttcccctaatttctaatttctgttttccattgccattatctttttttttttttttttgctctctttgtaacactaccaccatttcctaaggttcagacttcaaaattacataataaattttcctttctgtaccctgtattccattaatcaggaaattctatagattcttgctacttattctgtttttgtctatttttttttttctatcattctcagaacagcagaaactcagaccctgcaatgtttcttgttggtctttctcatctttgtatatgtcccacccctatgtttgatcatggctttcctttctttaaaaatctacagtctaatgtattatatattatatattacatataatataactttcttagattaatattcaaattcttacttgatttggccctagactattttcaaccattatctttcacaaaacacttttgaagacaaaaatcatgccatatgaaatgatttattgttctctaaacataaaatcactcctttcaatttcttgggcttctgatttcttccaaatgaaatacattttacaatgtgtttacatccccacaaattgaaagtaacttctgtcaacatagagactaaatgcttggtacagacatcttgcatggatgctaccaagaattccaaagttgtaaattatctcccttttcttttcttctatagaatattttatctactttattatgtctatcagatgctgcctggttagatggacatttatgtatgtcttcctattaaactgcaaggtccatgataactgggtcttttcaacctctttgtgtagttgttattactaatcacaatgaataaatcatagaagattttcaacaaatgcttactgagtctggaggtaaatattgtgaatgcaagctaatctttctttttaagaatgtacaaaatgctattattctatatgataaggaaccaaatagaaatcagtaaagacagaagaaggcttcttttgtcctctatggatgatatgtcattcctaaaaaacacatgctgtagtttcctaaattgaaaacttataaataacattatcatatcaccattgtgtatcatcaaaagaaataattaaaattgttttacaactgaatataaaaagtatcccttatactgcatattactttactcatttaattatcattaccttctgtgttggcctaagattgcatagcaagtaaatggtggagacaaaatgtacacataactcttctaaaactctaattttgtatacttcacacatatttgttctattatattaagcttatactggttttaaaatttcctttgtgagatcatgtgtcaacaaaacatcaaagacagtgtttaactcccttgcagaataagtttaaatgtattgtactaagctccaacatagtcactctgcatatgtgggaaagttcttttcagacttagagttcctgaagtagaataagagtttgaaatggcacttagaacctgtttggagctgatatattatactaaatacaaactataagtagtatttttcaaactgttggcacgtccccaggtaatacatggactacattttttccccaaaaggtatttggtttaatctagcgtttttcaaatcagatttcacatatgtgttgtcaggaaatgttagatgatccacacatcctatatagtcattaatttagtgttagtttttttattctatttgaaataagcaattgacacaattgacagcatttagcttttaatgtactggcaaacatgtcttagcaatagcaattaccttgacattttctaatattaaaatgattactatctgttacaatatttatatttgaatttttattataaggatatctaccatttgatcctaatatcaaaaagataaaatcatttcttttctaacacaattttcatgttggactttttaacattaccagacaaatgtataggtataaatttctattgaaaatgttttcatagattaagacttcaatttattaaggaatataatatattgggatctgagagtaagaaagagcattgagggaaagtaatgtaccatttatagtggattgagaagaggaaaacagaggctgatttaaaatgcaaatgcaacatgtgcaccaagggaaaggccagatgctatcacaaaggaaaagatcacttaaatagaaaaaagtggtgaggtggtcctgccatcacatcaccattagtttgctgaacctccaccaacttacactgtagcattcagtaccgtgtttatattgagagttttaatttagtttagcaaaatatcatccatcacattaattgaatgctgttactctgaatttttattttcttaaattttttagtatttgctataaatgcttggctttatgattgggagagaactaggcacatgagggatttattctgttgtatgtttttatgtatttaagcaagataaaaataactgaagtcaacactgctagttcataatacatctttcctttatgtgaggtttttttcttttctctagttgggagtcattgtctttaactataatcattcatacagcagttttaaaacaaaagcaaacataatctaaaacctactataatctgtttttgaaatgctaatagcaggtttgccagttttaaagtgtaaagcaattcattatcacagctagctgacaaaagcttgggggcaaagatctgctaaaattatattaagaaaaatacaaaacagttaacacttgaactttgaaactgtttgaaaatactagaatgagtctgtactagtatgtataacattttgttatttatggacatttaaaaacaaatgaaaacgcttgaaaatagctgaaaattaaatacatcttaaccaatataactaagtcaacttcctccccatggagaataaaa

SEQ ID NO: 96741 - DNA, 26424 bp, Homo sapiens
acagcctggctgggacgtcagagctaccagtcaggctgcggaaacagcctgggggttcctctgtgaccaaaccattccacgccgtggtctctacccagagaaaggaaaacacaggtccatacgcgtgttcgaggcggcatgattcataacgaacaaaaggagaagacaggccgggcgcagtgcttcatgcctgtgatcccagcactttgggaggccgaggcgggtggatcacgaggtcaggagatcgagaccagcctggccaacatggtcaaaccccatctctactaaaaatacaaaagttagccgggcatggtggcaggtgcctgtaatcccagctactcgggaggctgaagcaggagaattgctctagccagaagggtggaggttgcagtgagccaagattgtgctgctgcactcagcctgggagtcagagcgagcaagactccgtctttaaaaaaaaaaaaaaaaagaaaaattcagccgggcgcggtggctcacacctgtaatcccagcactttgggaggctgaggcgggtggatcacaaggtcaggagttcgagaccatcctggctaacacggtgaaaccccgtctctactaaaaatacaaaaacttagccagtcgtggtggcgggtgcctgtagtcccagctactcgggaggctgaggcaggagaatggcgtgaacctgggaggcagagtttgcagtgagctgagattgcaccactgcactccagcctgggcaacagagcgagactctgtctcaaaaaagtaaaaaaaaaataaaatagatgtatataaaatatataaataaatatatataaatatatatataaatatattttttcttttttttttggatggagttttgctcttgtagcccaggctgggtgcaatggcgtgatctcggctcactgcaacctctgtctctcgggttcaagcaattctcctgcctcagcctcccaagtagctgggactacaggcgcccgccaccacacccagctaatttttatatttttagtagagacggggtttcaccgtgttagccaggatggtctcgatcttctgaccttgtgatccaccctcctcgacctcccaaagtgctgggattacaggcgtgagccaccgcgcccggcctattttttaaaagattatggatttagggcacctcctcccttctccttttagccccagataacattccattctcgatgtttatctgctcgcctgccgaaggacgttttggtggcttccagggctgggctgttatgaatagcagagctgcaggccgggggcggtggctcacgcctgtaatcccagcagttcaggaggccaaggtgggagggttgcttgaggccaggcaatcgagaccagcttgggcaacacagcaagaccccaatctctaaaaaacatacaaaaattagccaggcatgatggtgcacacctgtggtcccaatggttccagccactcaggaggctgaggtgggagaatcacttgagcccaggaggtcgaggctgcagtgggctatgactgcaccattgcacctcagcctggacaggaggacaagaccttgtctcaaaaaaaaattttttttttgagagggagtctcactctgtcacccagggtagagtgcaatggtgagatctcggctcactgcaacctccacctcccgggttcaagcgatcctcctgcttcagcctccagggtatctgggattacaggcgcctgccaccacgcccagctaatttttgtatttttagtagagatagggttttgccatgttggccaggctggtctcaaactcctgacctcaagtgatctgcctgcctcagcctctcaaagtgccgggattacaggcgtgagccaccatgcccagccaaaaaaaaattttttttttaaataataaaatagaggctgggagtggtggctcacgcctgtaatcccagcactttgggatcacctgaggtcaagagttcgagaccatcctggccaacatggcaaaaccctgtctctgctaaaaacacaaaaattagctgggcgtggtggcttgtgcctgtaatctcagctacttgggaggctgaggcaggagaagcgcttgaacccaggagccggaggttgcagtgagtcgagattgtgccactgtgctccagcctgggcaacagagcgagagttcgaatcaaaacaaacaaaaaaagccacaggcggccacacatagaccgtcactgacctcctggagcttctcttctcagggaaaggaacttccagactcagaaaactggggcaggaaacatccaggccagtttttccagcccaccggatctcaggcagcttccaggaggattgcctgaactcgctgaaattgcccaattccctcctgggcacatggttttcagatgatgaacacacaccctgcaccggggctgaggcctcaccctggcgtttgaatcctgggccccgggtttagtccacaggaggagaagccacactggctgctgggagggaatgggaagcgggcagccgccgtggaaaacatggatcagtgcttcagaaagccagacagcggcgccgtctaaccccaccgtgcggctccgaggaatccaccccagataaccgaacacagcggctctcaataaacatgttcacagcagcatgagccacgggagccaggggtggacggaaacagtggcacgagccacaggagccaggcgtggaaggaaacagtggcacgagttacgagagccaagcgtggaaggaaacagcagcatgattcacgggagccaggcatggacggagtccacaggagccaggcgtggaaggaaacagtggcacgattcacgggagccaggcgtggatggaaacggagaggagcagagagcaaggctctgacgccagccacagcgcagatgcaccctgaggatgtagggctcagacggatgcccgacacgaaaggccacacagcgtgtgatcccatttccatgaaatgtccagggccaggcgtggtggctcacgcctgtgatcccagcactttgggaggccgagccggcggatcacgaggtcaggagatcgagaccatcctggctaacatggcaaaaccccgtccctactaaaaatacaaaaattagccgggtgtggtggcgggcgcctgtagtcgcagctactcaggaggctgaggcaggagaatggtgtgaacccaggaggcgcagcttgcagtgagccgagatcgcgccactggattctagcctgggcgacagagcgagactccatctcagaaaaaaaaaaaagaaaagaaaagaaaaaggaaaaacagaattaagcattgtagtgaataattcagtgggatttggtgccttcacggtgctgtgctgctgtcacctctaattccaggatattcccatcatcctttgtggttggggcatcatctgtcactccccatcccctccccatccctgagaatccatgcatccccttcctgtctctgtggcttggtctgtctgtcctggacatttctttttttctttttgttgttgttgttggttttgtttgtttgtttgttgtttgtgggttttttttgagacggagtctcgctctgtcgcccaggctggagtgcagtggcacgatctcagctcactgcaagctccacctcccgggttcacgccattctcctgcctcagcctcccgagtagctgggactacaggcgcccgccaccacacccggctaattttttgtatttttagtagagatggggtttcgccgtgttagccaggatagtcttgatctcctgacctcgtgatcagcctgcctcggcctcccaaagtgctgggattacaggtgtgagccactgcgcccagcctagccttttatttttaatagagatggggtcttgctatgttgccacgctggaatttttttttttgaggtctctctgtgttgcccaggctggagtgcagcggcacgatcttgacccaccaaaacttctgcctccctgcttcaagcgattctcccacctcagcctctggagtagctgggattacaggtgcccgccaccacacccggctaattttgtatttttagtagagatggggtttcatcatgttggtcggggtggtcttgaactcctgacctcaagtgatccgcccgcctcgccctcccaaagtgctgggatgacaggcgtgagccaccgtgcccggctgcccacactggaattctatgttataggaacttcatctcactgaaagaaaaaggggactcctggatgggtcctgaatttagacatttatttgttcatgaaacaaacgctgatggggccgttgcacacccaggtctgcactggccgccctgtggggccccggaggggcgggggcagggagaggccgcctgagaggcagtggcccgggtggaggacccagggctgggcctggcgatgctccgactgcagcttccggagaacaatctcaggtccacaatgtggagacgttggcagatgctcctgctgaggaccgacagacatcatccccgcttcatcctgctttttcctcccatgaggaggtcaaagtcacaccgtggggccaggcccggtggctcatgcctgtaatctcagtactttgggaggccaaggtgggcagactgcctggacccaggagttcaagaccagcctgggcaacatggtgaaatcccatctctactaaaatacagaaaattagctgggcgtggctgggcatggtggttcacgcctgttatcccagcactttgggaggctgaggcgggcggatcatgaggtcaggagatcgagaccatcctggctaacagggtgaaaccccgtctctactaaaaaatacaaaaaaaaaaattagctgggcgtggtggcaggcgcctgtggtcccagctactcaggaggctgaggcaggagaatggcctgaacccgagaggcggagtttgcagtgagctgagatcacgccactgcactccagcctgggcgaaagagtgaaactccgtctcaaaaaataaaaagaaaagaaaagaaaagaaaagaaaattaggccggtgtggtggcacacacctgtagtcccagctgctcgggaggctgaggcaagagaatcgcttgaacccgggaggcgagggttgcagtgagccgagatcgcgccactgcaagactccgtctcagaaaaacaaagtcgcacaggagagtcacgtccaccccctgggccaccggacagtcgccacagaccaggcagctgaatccccgctctacagacaaccccatcaaggctggggcagtgagacgctctgaaggccacaggcccccaggatcccaccccgtccgtctctccctccctgctgtccctctgtgagccacaccctgcggctgtcagcggcagtgatgggggctgcaggggctggggacagagggggatgagtttccagccaggcggcctgggagggtagctttaatccccacctcggttttgtcttagaagcagttgcatggctgtgctccaggccgtccagggttcaggctgagccaccgtctaggtctagacgtcagtgtccatcaggacctggcgtgccctgcaagcagacatgtgctccttcgacctccgtcaaccctggagatgaagcagggaaggggccctggctggaggcttggacatccatccggaggggcggagtggcctcgaggcggtgtgtgagtccccggggaagatgcaggggacgctgggtggccggtggcacgagtgaggctcggggtcccgcagccccccgtggtgtgggtgcctgagttggggggtcctcgaggaggacaagggagggaactgaagggggccaggacacccggtagcttggctgccgggggctctgtgatatgctaagtccctcctgctcaccactaaacccaagaggaaaaggaattcctggcagagtccaatttaaagtcaacaaacaaacaatgtgggaaggagagaaggaatcccaggaatgtgggcgaggtcctcctcccgccggggccaccctggacccggcgagaaatcgaaggtcccccaaggacccacgtccaggagccaacagcctctctgtgcaaaccagacaaccctgcaggaactgtgcttgragaaaccgtggaaactgcccccaaccctcccgtctctatttctttctctgttttattatctcattcttggctgtgaggtaaacaggagaaaatgagaaggtggttctggaggacccgaccgaatttgctttcgtgacagggtcaagcgccctttcctcgccggccgcagccctcaccaaaggggatttgggggcctcyggrcaggggtcctgaaggttttgaattgttcaatctctgggggtacaggaacccctgcaggaggtttcaaaggcaagagtttcgcagagagaaaaaaaccatgaactttgcaggttggtggcggaatcyggtgatttaagaaaacgtgtttaagcctcggccgggccgcgcctgggctgtctgcggtgctcttccggaattctctacaatatctggaagtgaccaagaaaattccagaacccggaggctgcgccgtggagataaacatgggcacctgggtatgtttgtttttattgttaggacctattttatcacaagcaaaaaaaaggaagctgcccagaaatccaggggtgatggatagaaggcgatggggcctgcagtggcccaacggattctagaattttcctctaggaagatgccygggaattttaaccctgttggctcgacccagaagctyrgggtggcarggaaaggatcactgtggccttcctkccttccttccttccttcctggaatttcgctctgttgcccaggctggagcgcagtgacgtaatcatagtttgctgcggccctgaccccaatggcacaaatgagcctcctgcctcaatctcctaagtagctgggactacaggcatatgccactacgcccggctaaattttttttttttttttttttgagacagagtttcsctcttgtcgcccaggctggagtgcagtgkcgcaacttyggctcaccacaacctccgcctcccaggtggaagcgattctcctgcctcagcctcccaagtagctgggattacaggcatgagccaccacgtctggctaatttttgcatttttagtagagacggggtttcgccatgttagccaggctggtctcgaactcctgaccttgtgatccacccacctcggcctcccaaagtgctgggattacaggcgtgagccactgcgcccggcccattgtttatttatttatttttgtagagacagggtctcgctgtgtcacccaggctggagtgcagtggcaagatcacatcccactgcagcctcgacctcctgggctcaagtgatcctcctgcctcagcctcctgagtagctgggaccacaggcatacgccagcacgcccagctaattaaaaaaaaaaaaaaamaactttagcagccaggcacggtggctcactcttgtaatcccagcaatttgggaagctgaggcggacagatcactagaggtcaggagtttgagactatccctgtctctactaaaaatacaaaaattagccaggtgtggtggcgcacatgtaatcccagctactccggaggctgaggcaggacaatcacttgaacccgggaagcagaggttgcagtgaggtgagatcgtgcccctgggcgacagagggagaatccatctcaaaaaaaaaaaaaaaaaatttccggatggggtctcgccacgttgcccaggctggtcttgaactcctgagctcaagtgattctctcacctcgacatcccaggttggtggattacaggcgtgagccacagtgcctggccctggcttttcttcttgtttgtcaggctctgctgttgtgataggaaggcttgaggacttcaaaggggcggctggtgtgcggggttggggacgatggcagggacaggagggaggtgctgttggcatgtgtggaatgtggcaytggcgctggatggacgggtctgtgtgcgctgactgcgtgtccgatgccagggcctgtgttccccctgcaygtccccaggaaggaactrctggaccagcagaatgaggggccaacgccagsggcagcactgcccggccacagaggactgtggccccacagatgacaccctcagctaccagctcctgcatctggaagatgaccaggaggaggaaggacrgtctgcaagtgttcaaagtgatgtttccaggccgggcgcgcttgtaataccagcatttgggaggctgaggcaggcggatcacctgaggtcgggagttcgagaccagcctgaccraygtggagaaaccccgtctctactaaaaatacaaaattagccaggcgtggtggcgcagctactcgggaggctgaggcaggagaatcgcttgaacccgggaggcggaggttgcggtgagctgagattgtgccattgcactccagcctgggcaacaagagtgaaactccgtctgaaaaaaaaaaaacctctataacatccaaaatactaaccacttgttacctctagattgtttggggatgttagatttctcctttgttgccagctcttttatttttatttatttatttattattattattattattattattattattattattttgagatggagtcttgttctgttgcccaggatggagtgcagtggtgtgatctcggctcactgcaacctccgcctcctgggtttgagcaattctcctgcctcagcctcccgagtagctgggactacacgcgtgtgccaccacgccaggctaatttttgtatttttagtagagacggggttttgccatgttggccaggatggtcaggaactccccaactcttatttttaaatgttgggccacacaagtctgggaaatgttagttttcaaacacatcagggaataaatggatacaaaagtcttgaggaccacttaagaaatgaacaatagcagatgtgtaacagttatactacgctgctaccttgtaaaacattttagaaacatctgtttccagccgggcctggtggctcacgcctgtgataccagcactttgggaggctgaggtgggcagatcatgaggtcaggagttcgagaccagcctggccaacctagtgaaccctcatctctactaaaactacaaaaaattagccaggtgtggtggcgggcgcctgtaatcccagctacttgggaggctgaggcaggagaatcgcttgaacctgggaggcggaggttgcagtgagccaagattgcaccactgctctccagcctggcaacaaaggaagactccatctcaaaaaaaaaaaagaataaaaagaatacaaaaagaaaaaaaaaacatctgtatcatccttgtagattctggggtttggaaacaggctttgaaaaaagtcctgaaacaggccgggcgccgtggctcacacctgtaatcccagcacttctggaggccgaggcgggcggatcatgaggtcaggagatcgagaccatcctggctaacacggtgaaaccccgtctctactaaaaatacaaaaaaattagccgggcgtggtggtgggcacctgtagtcccagctactcgggaggctgaggcaggagaatggcctgaacctgggaggtggagcttgcagtgagccgagatcgcgccactgcactccagcctgggcgacagagcgagactctgtctcagaaaagaaaagaaaagaagagaagagaagaaaagaaaaaatcctgaagcaaatggagcaaattttgaacagcttgaatacctgagacaggccaggggtgcggggcaggctcattttatattcttcacggttgtgtgaatttcttgcaattatatgtagcaattttttcaccaggatttagtatattagcatgtttcgggctgggcacggtggctcacgcctgtaatcccaacactttgggaggccgaggcaggtggatcactaggtcaggagtttgagaccatcctggccaacatggagacacctcatctctactaaaaatacaaaaattatctgggcgtggcggtgggcgcctgtaatcccagctacttgtgaggctgaagcaggagaatcgcttgaactcgggaagcggaggttgcagtgagctgaaatcgcaccactgcactccagcctgggcaacagggcgagattccgtctcaaaaaaaaaagaagcatgtttcctagcaagccaattcagaataaaaagaaaacaaaggagaaaatataatcccaataaaatatattgaaataaatatgtacacacatatatatatgtgagtttatgctttgttttgttttgttttctggaagacggagtctcgctctgtcacccagactggagtgcaatggcgtgatctcagctcactgcaacctctgcctccctggttcaagggattctcttgcctcagcctcccgagtagctggcattataggtaccaccacgcccggctaatttttgtatttttagtagagacggggtttcaccatgttgtccaggctggtctcaaactcctgacctcaagtgatcctcccgcctctgctatttatttattctgggttttttttattcttttttgttgttgttttcattttatctttcttttcctatttatttagagacagggtttcgccatgttgcccaggctggtctgaactcccggactcaagccatctgcccatgccggcctcccagtgtgctgggattacaggaggaagccactgtgaccagcctgaaagtgttcatttttaaatttttaatagagatggggtctcactatgtcacccaggctggtccgaaactcctgggctcaaaccatccgcccacctcggcctcccaaagtgctgggatcacaggtgggagccacgcgcccggccccaaagccctccttgcacaagcacctgagccgccatggcccacaggcccatcaaaaccagagcaaactggtacctgtgatacagcctccactccagccccagggcccagccccaggccacccgagccggctgtgggtgacctgagaccaagtgtcgtttcctgctataaactattgatgcctgagcagtcacctccaggagctccgggcttggctacggtgtcctgggttccctgtaatgaagcccggggcagctgcggcctggagggcgtctgctccgcctccatcctgggcccgcctggggctcttttccttctaggcctggttccctccaaaattagcttcctatcgggatcccacatcccctcacaatggaggcctgacctctggggagacacaatgtcagggtcactgtgaggtttttatttatgtayttttatttttatttatttgataccgastctcactgtgttgtccaggctggactgcattagtgtgatcctggctcactgcaacctctgcctctcgggctcaagygattctcctgcctcagcctcccaagtagctgggattacaggcacccaccaccacgcccgggtaatttttttgtatttttagtagagacggggtttcaccgtgttcgccaggatggtctcggtctcctgacctcgtgatcygcccgcctcagcctcccaaagtgctgggatgacaggcgtgaaccaccgcgcccggcctcgatttactcattttttttgagagagagagagagtctcactctgtcrcccaggctggagtgcagtggcgtgatctcagctcactgcaacctccgcctcttgggttcaaataataattctcctgcctcagcctcccgagtagctgggattacatgtgtrtgctaccacacccagctaatttttatatctttggtagagacaggcttttgccctgttggccaggctggtctcgaactcctgacctcagggcatccacccgcctcagtcacccaacgtgctgggatcacaggcgtgagccaccgcgcctggcctgactttattattgttttacaaagagcagaccttccacctgccatggataaaacgccgagttctagaggacactggagacagagtgttccccagaacaaggcctgggcgcagcagcctgcagggctggggtctccactcccgggggagcgtgcagcggggcctgccatccctctgtgcccccgccccacccccactctgcaggccgctgaccctgtggtcgggctggtgagcagatggctgctggatcactgacagcccggctcacgttccctctccctatggagacatcttccttttaataaattttgcaaggccgtggaggggggccagcgctctggcccacgtctgtctcccatccccatcaccacacgaggccccagcacgcctggctggcctaagtccccgcaggatgaatgggcttccggggcctgctgggaccaggtaagcaggctgtgcggcttaaaacaacacaaatacactctcgtctctggaggccggaagtctgaagtgaaggtgtgcaaggtgccaggcgagtaccctyccggcctcttccagctcctggtgccgacagccacctctgaccctcctggacttgcggccgcttccctcccaattctgcctctgctgccccacggcggtmtcctctgcatctgtgtccaaatttcccttgtctcccgaagtcgcctgtcactgcggtggtgcccgccctaatgatctcatcctaactaattacatctgcagaaaccctatttccacataaggtcccayttgtaggtgcctggggttcacgcaaagacagatctttgagggaactcaattcaccccaccccggggagtttgcctttgtggccggcccttccccctcagatcaaattctgcctcctcagcgaggccttcctgaccctcccgggcccttcctgcctttctctctggctgcggctgtttcctgcggggctggctgcagctcccggcggcgccctgtcctgtacctgtttcatgtccatcgtcggcaacccctggcttctaacacagctcattgcccgcaggacctcccagcaggagcagggacccagtaggccctgcgtctccgtccgaaccacaagctgctgtgggtggtcacttgacagaaagacccctgcccccccttccttatttgtttatttgctttttctgttgytttagagactggattttgccctgtcayccaggctggagtgcagtggcgaaatctcggttcactgcagcctccatctcctgggctctggtgagactacggccttagcctcctgaatagctgagaccacaggcgtgcaccaccacgcccagctgattctttgacttttgtttatacagggttttgccatgttgcccagggtggtttcaaagtcctggcctcaagcaatcctcgtgcctcgccctcccgaagtgatgggattataggcatgaacaactacccacttcactccatcctttcctttttttttttttttgagacagagtcttactctgtcaccaggctggagtgcaatggtgcgatctcagctcactgcaacctccgcctcccaggttcaagcgattctcctgcctcagcctcccgagtagctgggattacaggcatgcaccaccacacctggctaattttgtatttttagtagagaaagggtttcaccatgttggtcaggctggtcttgaactcccgacctcaggtgatccacccacctcagcctcccaaactgctgggattacaggcrtgagccaccacacccggccgagacagggttttcaggcgatctgcctgcctcgggctcccgaagtgctaggattacaggcgtgagccactgggcctggctttatttaattttttgagatgggatctcactctgtggcccaggatggagtgcagtggtgggatcccagctaactacagccttgaactcctggcctcaagggatcctcccgcctgggtttcccaaagggctgggaatgacaggtgtgagcccccacccccctggcctggatatttcatagaaatgggatcacacggggccaggcgcggtggctcacgcctgtcatcctagcactttgggaggccgaggcgggcggatcacctgaggtcaggagtttgagaccagcctggccaacatggtgaaaccccatctctactaaaaatacaaaaattagctgggcttggtggtgggtgcctgcaatctcagctccttgggactctgaggcaggagaattgattgaaccaggaggcagaggttgcagtgaactgagatcgtgccattgcactccagcctgggcagcaagagccaaactctgtctcgaaaaaataaaataaatgggatcacacgctgtgtgtccttctgtgtctggcgtctctcacggagcgtgacgtccttaaggtgcatccgcgctgtggcctgggtcagagcctggatccttttcacgctgagttgtgttccgcggtggacggccggcactgggttggtcttttcttccactaacgggaatttgggctgtttccacatgtggcctccgtgaataacactacgatgaacgttcatgtacgcgtttctgtgtggacttgtgtttccccttctctcaggggcatgaataggaggagaattgcggggttcctgagggccggcccccagtgctggcacatccccaagccaagccccacccctcttttttttttttgagacagagtcttgctccgtcacccatgctagagtgcaatggccccatctcggctcactgcaacctccgcctcctgagttcaagcaattctcctgcctcagtctcccgaggagctgaggttacaggcacccaccaccatgcccagataatttttgtttttttagtgggagacggggtttccccatgttggccaggctgatcttgaactcctgatctcagggatccacgcacctcagcaccctctttggaagttcctagcaagttctctgcctgagttcagacccacagggcctcttaggggacgggggagggtcagggcccagctctagctgaactcccccggggggaggggggaggggggaggctcaggacccagctctaggggggattgaggaggatcagggcccarctctagctgaactcccctgggggtagggaggagggtcagggcccagctccagctgaactcccctgggtggggtggggaaagagggtcaggctggggaggggagcacagaatggcggggtgccaggcctgggggagaggcggatggggtggggaaggatgggtctgggcagataacgctgtggccttttcctgttggcctgagggcccagggtgggggtggggagaggctggtctccctgaggtctgggcatagggaggtgtcctgggatgagaagactcttgagaagtgactttgataattcgggggcagatccttgggcccaccaccccttgcagggacaggggtccttcttggggtgggggatgaacagagactggagagggtgggggagaaaggagtygaggggctaatttacaggacctctcaggccgggtgtggcagctcacacctgtcatcccagcacactgggcagctgaggcaggaggaccccttgagcccaggagtttgagaccagcctgggtaacacggtgagattctgtgtctacaaaacattttttaaaatgagccaggcgtggtggaactacttgcttatagccccagctaccgagaggctgaggcgggaggatcacctgagctggggaggttggggctgtggggagccgagactgtgcctctgcactccagcctgggcaacagagtgagaccctgcctcaaaaaaataaataaacaaaaaataaataaagcccccattccctttaggatctctacttcctataccaacccactgtcccagcttggaggggcgggaccagcctcgagccrcagttgattcccagagcacagagcacaggacggaagtggttctgcatggggtatagtgaggccagggaatagcaatgcattcctgtccgtgagtcctggccatcaggccttggggtggcctcaccgaacccccactccaagctccgttcaacagaaatccaggaaatgggccggagaggctgggagaccacccaggagaccagcccraggccgcgccctggatccctgagccctcacttttgtaattaagataataaacctgtgctggctgtgcgggcacacacctgtcatcccagcactttgggagaccaaggcgggcagatcacctgaggtcaggagttcgagaccagcctggccaacacagtgaaaccccatctctactaaaaatacaaaaattaggctgggtgtggtggctcacaggtggattacagggtggcctgtaatcccagcactttgggaggccaaggagggcagatcacaaggtcaagagatcgagaccatcctggccaacatgctgaaaccccgtctctattaaaagtataaaaattagctgggcatggtggtgggcgcctgtagtcccagctactcgggaggctgaggcaggagactcgcttgaacccaggaggcggagsttgcagtgagctgagatcacgccattgcactccagcctgggcgacagagcgagacgccgtctcagaaaaagaaaaaaataaatcaaataaaaaaataagaataaaaatacaaaaattagctaggcgtggtggcaggcacctgtaatcccaactactcaggaggctgacgcagaagaatcacttgaacccgggaggcagaggttgcagtgagccaagattgcgccactgtactccagcctgggcaatagagtgaggttccatcccccccaaaaaaaaamcmaaaaaaaaggaaaaggaaaaataaatctatggaactgctcatggggaggagggacggcctggccctgccactcatgttgacgaagaagtaaactgaggcacggcccttccctcccccatcagaactgaaaggtgtctgaggccccagcaggccctctgcatgagattcggtggctctgagggcctcagatgtcctcactcccccccccgtttctcctgccaggctcagagtatcattttcaaaatggtaaccagcaaaccaacgtgattctcgcacaaaggcaaggtgagcctgttcctcgctcaccctgaatcattcatgaaggaggcagctggcctgcgggctgggatgggagacaggagaggagaaaagacagaggctgggccctgctcgctaaataaatcaggtgcccacgggagcccctgggcgtcttcccgcgctggcgttctgcatatgacagctgacctgtaaattgctgggccctcagccatggttactgtcaggccagcccaggaaggacactggtttcaggtgacctgggtgaggtggaggcggtggggggggttcctgggaccaggccgccattgcaaaaacaaacggcctgcttgtacctgctatcgccctctaagcttcaggtggtgggtggggctgaggggctgagaggtggccccaaagaaagacaaccacatcctaaaccctggaacccgtgaacaaggcttcatttggaacaccagtctttgaaggtaccattaagtgtcttgagatgagatcatcctggagtctgcaggtagaccctaaattccgcgacatacattttattttttatttttacttttttttttgagatagcgtgtcactctgttgcccaggctggagtacagtggcgtaatctaggctcactgcaacctccgcctcccgcgttcaagtgattctcccgcctcagtctcccgagtagctgggattacaggagcaaaccaccacgcccggcaaatttttgtatttttagtggaaacgggctttcaccatgttggccaggatagtctcaggctcttcaccttgtgatccgcctgcctcggccttccaaagtgctgggatgacaggtgtttattttcgtttttgttttttagagacagagtttcactcctgttgcccaggctggagtgcaatggcgcaatctcggctcactgcaacctccgcctcccgggttcaagtgattctcttgcctcagcctcccaaggagctgggattatagggcatgcaccaccamgcctggctaatttttgtatttttggtggagaggaggtttctccatgttggccaggctggtctcgaactctgacctcaggtgatccactcacctcggcctgccagagtgctgggattacaggtgtgagccattgcacccggccagacactgtcttaaaaaaataaaaataaaaaaaggtactggacaggtggctggtcatgtggggcttgcggggtaagggatggccttgggtttatactttgagcaagacaggaggcctggcggggccacgatcagaagtgggttttaacacgattccgaagggttagactggtgcttggaacctggtggtctctactgctgccagctgccactcagacccccggccgcccctgcctgtctgctttcagggcggggcccatcccaggcactccgcgaacagacagaagcggctggttctggtggtgtgaggatgggggtctccaggggagcaaatccacagtaacacactgggcttctcccagatccaccggacattcctgatgagtgaccctggctgcagatggctcttggtgagtctccgttgaccgggtggttcgggccaaaggaccttgccgtgcgatgcctccatggagctcggcggccacccctaatccgggctggaatcctctggcaccrgacgcccggcggggctccaaggctcctgggcccacgccaggccccggcctgaaacgcagcactgctggaataaaacacgccagagaagcagggcgctaggctcgcctggatttggggaaacgagaattgtcatgtcttctccctccgtaggttggtgttaatgaaaaacccccttttcagcatggactaaatcccgctaattctatttagggagcagtgtctactccrggccgggaactgctccggtttccaaccgcagcctcccgtgagggtcccagtgtggagggccggggtcatcccctcactctgggatggctcccaacccgctgacctggcctccccgtcaggcaccctcacagctctgtcagactcttcatgtgatcagcgctcctgggaacattagtttagggtgttttctgctgctgggatggtggcccgggagggaccctcctggtgaccctgctgggcctggccctcagtttccccagccgtaggctggcagcctcgaactgtacgagctccaggccacagtttccccagctgtaggtcagtgggccagggactgtagggggctcgggcctcagtttccccagctgtaggcgggtggcttgggcctcagtttccccacctgtaggcgggcggccttggattgtatggagcccgggcctcagtttctccagctgtaggcggatggccgtggactgtgtgtggcctgggcctcagtttcccccgctgtaggcagatggccgtggactgtgtgtggctttggcctcagtttccccagctgtaggcggatggccgtggactgtgtgtggcccggacctcagcttccccagctttaggcggttggccgcggactgtgcaaagtccaggcctcagtttccccagctgtaagcgggcggccgcccactgtacaaggtccaggcctcagtttccccagctgtaggtgagaggccgcggactgtacaaggtccaggcctcagtttccccagctgtaggcgggcggccaaggactkcaaggtccaggcctcagtttccccacctgtaggcgggcggccgcggactgtacaaggtccaggcctcagtttccccagctgtaggtgagaggccgcggactgtacaaggtccaggcctcagtttccccagctgtaggcgggcggccgcctactgtataaggtccaggcctcagtttccccagctgtaggcgggcggccgcggactgtacaaggtccaggcctcagttttcccagctgtaggcagccggccgcggactgtgcggggcccggacctcagtttccctatctccgcagtcgggattcgctgttccggggcgaacaaagaacggtcgggggtgaccccggatcatggcgcgcccgcagtatctgtggccactgtggaaacagccctggcgtgtccgggacgcgacgcggcctttccctccccgcgcgatcacccagatgtgagcgctcagtttgaatcggactttttggccatgtgcccacaaccaacatggagccctgagggtttcctgcccgactccaagatggcgatgcgactccctttgccctcacggcccaggcgggcgggtcctgcccacttgcaagatggcggcagcctgggcmaagcacgcttcccgccgcctgactcgccacgtacccactctcaagatggcgtctcccgcaaagccacgcgccagctgactggctcagacgccgtcacgtgatcccattttctccccctcccccgactacacaagccgtttccgccttcggccttgaggaataaccgcctcccccaataggcgcctgcgatttctctgggtcccgcccccgggcggccttctggccagtgggaggtgctggcgggggcccgcggggctctccccgccccctggctgcagcgggagccaatgggcagcgcgcgcgggggacgtgtgcgggcgtctccgccattttgtgagtctataactcggagccgttgggtcggttcctgctattccggcgcctccactccgtcccccgcgggtctgctctgtgtgccatggacgggtgagtcgcacgtcgccccgcgccccaccgccctccccgcgccgcagccctgcccccgccgccgcgccggcctccccggggccgatctcgccccctctcgggcgggagggggcggcgggctctccccttcctctccgcgtggcgggcgcgggtgcggggcgggtcaggggcttcccgggggtctggccgcgtccccatcccccgtccggcccgcttccggcccccgcgcgccccgtccctagcgcacgcggcctcccgcgcccctccccctccgcgcgcgtccccgcacttcgcctttgccccgcctcggcggcgcgcggcccttcccgcttcccgtccggccctcgcgcgcccggatggcccttcccgcctcccgtccgctcccctcgtgcgcctgcgtagcccgtcgcgcgtccccgttggccccagcgcgcgtgcgcggccgccatcgggggcgcgcgcctttcccgccgcccggactctgcccccggcgcagccccggaagcgcaggcggggctggggcggccgccgggagggaaagctggcgccggggcctcgccgcgggcccgagtctctgcgctccccgccctacccctgccccccgtgcgccccgggccgcggccaaggggtttcggtgatctcgggagagaagcggccgccccgagggtctgtcctccgccccggggccggaggggcctctccagggacccccgcgggcgccgtcatggggaggggccttcccggctctcgggccggggcagcctttccgggcggctttgctgggcgggcttcccttgggagaggtgggagccccctccagaaaggccgtgtcccgccgagcgcttcctgcgcgaggccctccctgggaataggaagcgggagaggctggagatgtttcgcattctttccgttttcctgagaagtttttcttgggttcagtcacttttaaaagtctgttaaacgtggtccgtgcagtctgtggtgtcagaagaggcgcagccctagagtgggtctggaccccttagcatgcgtgcgggcaggtgggtcctgcagacggcgagacgagggctccccgctctcggacccagcaccgcgggctcgggggccgcgcactcgcctcccggagtgaggcaggaggcccggaggctgcccttccgacggacgctccgagtcacttagggcctcgccgggagttgcagtggccgggagaagccgtggggagctcactgttgggtcaggacctggccggggctgaagggagggcctcggacagtccggctttctatccaccttccccccggggtgtcccgaggagggagagtcgggtcgggcggggctcgggttgatcagtaactgaggctgtgttctggtcggtctgttaatttttattgacggtttccacggccgcctcctgctctcctcggtggatcgggctccactctgctgagaggcaccctcttgggggcccacccctacccgggtggaagctctggcccaggcctgtgagtttgccagtttcagcctctccgaggcgtttccaacttactggaaagcacacagcagcccttgaaccctctcagcggcatctagcattcctcggggcttccgatgggggtgtctttgtcttggaacgtgtggggcctggtccagaggtggggcctggggtcctgctgggagggaggggcgccaaaggacaatggtggccccttttcaagttgcagtcaagtggacggctcacttccctgcccttctgagctttctctagcggggcctcgtgcagccagagggagccctgcggaggtggcagctgcagggacctacgggctctcctggcccggggacagctgggtgctcctgctgctgagtggccaccaggctaacgttgtctcctttctttctctctacagcattgtcccagatatagccgttggtacaaaggtaggcacttctcactttgcttctccgtgacgctcctctgaccttgtgccgaccccgggggccaccccccagcgctgttgcgttggctagagggcgcttttccattcctaaggggcactacccttggtctggaatctggagttgggcggtagggtttgaaccccgggctccagtgcccgtgagttttgggggcttgggtttgctggccgcccctcaggtctggaatctgagctgctcttcggttcttgctgtcagcagcgagggctctgtgtgccccaggcctgcctttggaacttctgcctctagaggctggaatcgtgccgttcagtgggaaacctcatgttgtggctgcctgggagactcttggttttgataggaaaagagccacctggctgtggaggggacctggatagaatccagcctatttgagtggctaggatgggcatttactggttgattttgacgttaagtttttttgtttttgtttttgttttttatttttgagatggagtcttgctttgtcaccaggctggagtgcagtggtgtgatcttggctcactgcaacctccacctctcaggttcaagcgattctcctgcctcaacctcctgagtagccgggattacaggtgcccaccaccatgcccagctaatttttgtatttttttttttttttttggtaaagatggggtttcgaacattgttggccaggctggtctggaacacaggtgatgcaccccccttggcctcccacagtgctgggattacagttgtgagccgccagacccggctgacattaagtatctttgatggcatctggttagaacagcagcaaactgtcaaaggtggtgtttggggcaagagaaaaatgaatgtgccacgtctctggggtgtgcgaatcttgcagccccatggagggtgaggccagggctcagcatgtgaggaaagggggtcagaacctggagaagaagaaggtcctggggaggcgattctcgagggagctgtagtcctcgcttagctggggtagttggttaatgattctgctggtcattgtgggttgagggggctcccgacttcagggcttgtgccccgagagcctcccgcagggcgagcccacagtggtggcgtcctgagccagcagccagttggtttctggtcagtcagcagtggtgcctgggccaggtttcggtttttcccaagtggactgctgtctttacgcgctgcctgccccgatcttcctggagataaaacctgtttgttcagtgtgggaggagggagaggtactttcatctgaagcatttgcaacaatccctagatgtgtctggcttgcaggcagtcgtctcttccctgcttctgtgggcctgctttccagctggagtggccctcagcttccatcgggtggtccttgagccctcctctgcagttcctagggggctcctgggctgggacgttgaagcccagccaggacttgaagcctgcgggagggattttgccacagggcagggttagggctcctgctgggtgcaggccctggtaggaggacggggtagtaccctgacccagatgataccccccctcccccccaccaccagggagccctcagctgacctgggcccacacctggctacgctgtcctttagcccaggacagagcaagctcttgttcagtgtggggttaaagacacctaggaactgtgctgtagggccccagctgcagactggaagtcctggggcgtttcctgtcaatctgtgtgcttcaggacaggtgccctgaagggaccctcctggggtacctggcagctgctgtgaaggcagtggaggcgctaggcccagctcgtgtctcctggttgctgccctgtggagcctcggagcctccaggtgtcccttccgttctgctggggcgccgttgagctgagccaagccggcctgtgccgcctgggcaggcatggagtttgctgccgcagacagttgtgggcaatgccaggccacttgcccatgggaatgagattagggcttcaggcaggcggccaagaggaccgctcagaggaagcggccccgcccaccactccagtcaaagacagggtccaagatgccctttttaaggtttgtgcagccagcacatgggagccgcatgggcgcttggccactctccagcttgggggaggaccagccctggtgtcctggacggggtcggctcctgggctcccccagcctctgagctggaggggagagcagacaggaagcgacttcctgtgggaggcgaaggttggaggccctgcgtctcaggtgcacccatcctcccttcctcccgtcctcccttcctccggtcctggcactgctgtgttttctgatcgcgtggtttccacctgaggcggctggctctgacccctttcccctgggcctgcgcagccccgccttgtgctcatagggggccccagactctgaaagcgagaggactcgagggtctgttttcagtatttggcttcatctgtgtccggccggaacctcagggccgccgtgacactggacactgttcattctctgaccctaaagtcttggggactgaacaggtgccatttgggtgggcgccgggcctgtggaccctgagtgattcctggttccggcccttgtggctgctcgattgcttgtttggtgacgccctgagtgcttgtgggattggtgggagactcagggctgcagttagaggtctcattggcaagggccagtccctgttccccatcctccttgagcaggtgccggagtctcccgaggctcttgccgtccgcgtcgggaggaggcagctgtggggctttggaggctcgggcagtcttccttccaggaagctcttgagccagggccagggcaggagtggagctgaacgtgggtggaggggaggcggccttaagagaagaccaagcgcaggctcggggaggccagcgttggtgggggctctttggccaggtgtgggggcagctccttgaccaggcatgggggtgtgtggagctgggggttgtctgaggggggacagggtgtgatatccactggttctttctgatgcgatggccctgggcccttcagcaggtgggggcaggctcttggcctcaatcctgatacgggagatggaggctcctttgttccctgggatggccctgtcctggggggcctgggcgttgctgccctcagcgcctgcagaggctcgctttgcagaccaagcgcctgtgctccaaggtcctcagacccgagctttgttttctgtgtaactaagggccgtaaccaacgtctcctccaatttcactctttgaataaacgtgtgtcttcaatccttgcagcgggggggatgtctgccgtcctgagcctaggatcagtctagtgcaattcttagaagttgatccaattacatagaaataaccagtgaatagattgtttctggagagaaaatggacaggtcagaagtgatggagccgctgtggagctcccccggccctagtcacggccgcgataccagcggatcactgggcgggaggccgtgtctctagtcctcagtctcgcgtgtgcagagacggaggtcgggtttcttttccgggctggaaaacaggagaggaggggctcctgcgagagtgagggaggcagcgctataatttggttctcttgcgaggccaccagaagtgaggacggctgcctgggccctgccgtgtgctgctgggggggctggctccatggagggggtcctctgccct

SEQ ID NO: 96742 - DNA, 102148 bp, Homo sapiens
ctgggttcaagcgattctcctgcctcagcctccccgtagctgggactacaggcatgcgccaccatgcctgggtaatatttttgtacttttagtagagacagggtttcaccatgttgatcaggctggtctccaactcctgacctcaaatgatccacccacctcagcctctcagcgtgctgggattacaggcgtgagccaccgcgccaggccagcaccttggattttaaccaccatcctagatcaggaagtttaaatttctctccatgttaaaattttcctttctcatattgttaatacattactatttgattaatacaaattactatttgttaatacaaatacatgctatttgattcaggttttgaagcaaaattcctgataattttaaaactatgagagttatttctttctatgcatcttattgctgaggtcatcttagctgatcattaattggacaatatagtggtaaatccatactggtctttgactctgaaaacattctttcaaattccattggtgctttccactgttttgacacgactttaagatgttatccagactcttctgagcgcaaagaatatgtgtctgcatataaatggcctaacaaaacacaccactctgtctatagccatgaataggaagtccccatctctgggcactgccagtcacccaagaggacaatgtgaagagctggggttgctgctctagggagaagcttgtgggcttgggcgagtttcagtttgggagtctttgtgacttaagcaggaaaaatattaactcagattactccctttggcctaaaaatcatttctattttttattgtttaatttttgaaatagaaaatgtattcatatggttcaatatttttaaagtatgaaaagataattcaatatttaaaagtctcactcctcataacaactgtagtctctttttttttttttttgagacggagcctcactgtgtcacccaggctggagtgcagtggcgtgatctcggctcactgcaacctctgcctcccgggttcaagtgattctctgcctcagcctcccgagtagctgggattgcaggcatctgccaccacgtccggctaatttttatatttttagtagagacggggtttcaccatgttggccaggctggtctcgaactcctgacctcgtgatccacccgcctcagcctcccaaagtactgggattacaggcgtgagccaccgcgcctgccctactagtctcttttatatctagagattcttgttgaaaatatgactatattcctctaaatctacctcctttattccttcccttaaaacggcctttttttttttttttaggcataaataatatacaacagcctgggcactgtggctcatgcctgtaatcccagcactttggaaggctgaggtgggcagatcgcctaaggtcaggagttcaagaccagcctggccaacacggtaaaaccccatctctactgaaaatacgaaaattagctgggcatggtggcgcatgcctgtaatcctagctactcaggaggctgaggcaggagaatctcttgaacctgggaggcagaggttgcagtgagccaagattgtgcccctgcactccagcctgggcaacagagaccgcatctcaaaaggaaaaaaatatatatgacaaagtgtacacatttaaaatgtgcaatttgatatgttttaacatatgtgtatacctgtgaaaccatcaccacaattggggttagggaaaaaatccatcaccccaaaaagttttcttttttttttttgagacagagtcttgctctgttgcccaggctggagtgcagtggcctgatcttggctcactgcaagctccgcttcccaggttcatgccattctcctgcctcagcctcccgattagctaggactacaggcacccaccaccatgctcggctaattttttgtatttttagtagagacggggtttcatcgtgttagccagatggtctcgatctcctgacctcgtgatccaccggcctcagcctcccaaagtgctaggattacaggcgtgagccaccgcgcctggcctaccaaaaagttttctcatgtatttccctagtgactaatgatgttgagcatcttctcatgtgcatttttgctttacctgtatcttctctgttgaagtatctgttcagatcttttgtgaggacaaggtacggggttccaggtagggatccaagttcattttttcgcatgtggatatcaaatgtcccggcaccatttattgagatggccatcctttctctacctcatcgcttttgtaaccttgttcaatatcagttgtccattgatgtatggatttatttatggactctattaggttccattgatctatctgccctctttaagccaatactatgctgttttgattgctatagctttataacaattttctcttttttggccctaatttcacatttattttatttttaaaattttgacttttattatagactaaagggtatatgtgcagctttgttgcatgggtaaatcgcatgactctgaggcttgaggtcccagcgatcctgtcccccaggcagtcagcatagtacttaactagtcgttcttcagcccatgctggtaacaactttcaaaatcaagtagtgttcttcctccaactttgtttttcttctgcagagttattttggctattttaggtcctttgcatttccagatgaattttagaatcagcttatcaatttttaccaaaaaaagaatctcatgggatttcaattggaattgcattgactctacacatcaatttaattgcctcctcttgtttcttttttatatgaaaggttgtccccatacacacagttctgcacctggctcttcacactccacaatgaatggagatctttcattcttctcccttagctcccattatagtttcattgtatccttttgttgggatggaacttatttcatttaactgtagtgaaactgatggattgctagcttactgctgatattttgctattacaaacagtgctgcagtataatcactgtacgtgtcatttcccttgtgggcaaatatatctgcaggatgaatttgagaagtgtgattgccaggtcaaagggaatatacatttaacattttactggcaagggccaggtgcggtggctcacgcctgtaatcccagcattttgggaggctgaggcgagcggatcacaaggtcaggagattgagaccatcctggctaacacggtgaaaccccatctctactaaaaaaatatacaaaaaattagccgagtgtggtggcacccgcctgtagtcccagctactcgggaggctgaggcaggagaatagcttgaacctggggggcagaggttgcagtgagctgagactgcgccactgcactccagcctaggtgacagagctaaactccatctcaaaaaaaaaaaattaatggttatggctaaatcctttcctagagtttcataatttatatacttttcattaatacattagaaggcttgttttgccatagccttaacagtgcattaccaaactttcttgtttttgccaaattaataggtgaagatggcctatcaaaatcattttgattttcacttctttatttcaggtaagtttaaacattgtttcatgtgttgaagagccatttgtatttctttcttttttttttttttttttttgagatggagtctcgctctgttgcctgggctggagtgtagtggcgcaatctcagctcactgcaagctccgccttccgggttcacgcgattctcctgcctcagcctcccgagtagctgggactacaggcacccgccaccacaccttgacagggtttcaccgtgttagccaggatggtctcgatttcctgacctcgtgatccgcctgcctcagcctcccaaagtgctgggattacaggcgtgagccaccgcgcccagctgtatttctttttttgagacagagtctggctctgtttcccaggctggagtgcagtggtgcaatctcaaatcactgcaacctccgcctcctaggttcaagtgattctcctgcctcagcctccctcgtagctggcactatagttatacacccagctaatttttgtatttttaatggagacagggtttcaccatgttggcctggctggtctcaaactcctggcctcaagtgatacgcccaccctggccttccaaagtgctgggattacagggatgagccaccgcaccccgccccattgtatttccttttttctgactttttgttttcacaaccttggctgctatggtctgaaggtttgtgcccccttaaaattcatatgctgaaatcctaacctccaaggtgatactaggaggtggagacattcagaggtgattaaatcaggagggattatgtctttataaaatagtcctgaaggagcttgttggccccttccaccacgtaaagacacagtcagaaggcaccatttgtgaaccagaaagcatttcctcagtaggcaccaaatctgtcagccccttgacctaagagttcctagcttctgccagaactgtgagaaaaaatttctgttgcttatataaaccacgcagtttgtggtattttgtcatagcagcctgaactaagacttgcacactttttctccattttgccatctttgcttataccttttttctttttcttttttttttttttgccataatggaggttttaaaaatatttatgcatttgaaattactagcctttcctttgaggctttagatttttagtcttaattagaaagtctttccccactccagtatttgaatttcctcgtgattttcttcaagtactttgatgagtttttttttcttttacattgaaatctcttcattatttggagcctattctactacagtgcatgatatctaatttgtttccctgttgtctcaacaccagtccatctttccccccacccacctttgatgccactttatatagtaaatgttcacgtgtttgaggctatttctggatttttctgttctgttccatggaatgtctgtgtaatcatgcatcagaaccacactactgaaactgtttttcaaattataatatggcgtaatatctggtaggagtggtctcacctcattgcttagttttctgacattaatttttccatatgaactttagaatcagcccattacaggaaactgtttgcatttttatgaggattatatgccatttttaagttattgtaggaagaatcaaccctttctagtgtgatttttttttctttttttctttgagacagagtctcactttgtcacccaggctggagtgcagtgatgcaatctcagtttaccacaacctctgcctcctggattcaaatgattctcctgcctcagcctcccgagtagctgggatgacaggtgcatgccaccacgcatggctaatttttgtatttttagtagagatggggtttcaccatgttggccagtctagtctccaactcctgacctccggtgatccgcctgcctcagcctcccatagtgctgggattacaggattacacggtggtgcccggcctcagttttgacgactttccctgatgactaatgatgttgagcatctgttcatatgcttattgaccatttatatcttttttttttttttagatggagtttctctcttattttccaggctgcagtacagtggcgtgatctcggctcactgcaacctccacctcccaggttcaagcgattctcctgtcttagcctcacgagtagccgggattacaggcacatgcccccattcccagctaatttttgtatttttagtagtgacggggtttcatcatattggtcaggctggtctcaaactcctgacctcaggtgatccgcctcggcctcccaaagtgttgggattacaggcgtgagccacccactgtatctcttgttcggaggaatatctaatcaagaaaatcatttttactgtttttattttttggtttgttcgtttttttcctgtgagatggagtttcactcttgttgcccatcctggtgtacaatggcgcgatctcggctcacttcaacctccgcctcccagtgcgtccggaattggtgggttcttggtctcactgacttcaagaatgaagctgcgcaccctcacggtgagtgttacagttcttaaaggcggcgtgtccggagtttgttccttctgatgttcagatgcgttcggagtttcttccttctggtgggttcatggtctcgctggcttcaggagtgaagctgcagaccttcgtggtgagtgttacagctgttaaggtggcgcgtctggagttgttcgttccttccggtgggttcgtggtctcgctagcttcaggagtgaagcttcagaccttcacggtgagtgttacagccgttaaggtggcgcgtgtggagttgttcgttccttccggtgggttcgtggtctcgctagcttcaggagtgaagcttcagaccttcacggtgagtgttacagccgttaaggtggcgcgtgtgcagttgttcgttccttccggtgggttcgtggtctcgctagcttcaggagtgaagcttcagaccttcacggtgagtgttacagccgtgaaggtggcgcgtgtggagttgttcgttccttccggtgggttcgtggtctcgctagcttcaggagtgaagcttcagaccttcacggtgagtgttacagccgttaaggtggcgcgtgtggagttgttcgttccttccggtgggttcgtggtctcgctagcttcaggagtgaagcttcagaccttcacggtgagtgttacagccgttaaggtggcgcgtctgcagttgttcgttccttccggtgggttcgtggtctcgctagcttcaggagtgaagcttcagaccttcacggtgagtgttacagccgtgaaggtggcgcgtgtggagttgttcgttccttccggtgggttcgtggtctcgctagcttcaggagtgaagcttcagaccttcacggtgagtgttacagccgttaaggtggcgcgtgtggagttgttcgttccttccggtgggttcgtggtctcgctagcttcaggagtgaagcttcagaccttcacggtgagtgttacagccgttaaggtggcgcgtgtggagttgttcgttccttccggtgggttcgtggtctcgctagcttcaggagtgaagcttcagaccttcacggtgagtgttacagccgttaaggtggcgcgtctgcagttgttcgttccttccggtgggttcgtggtctcgctagcttcaggagtgaagcttcagaccttcacggtgagtgttacagccgtgaaggtggcgcgtgtggagttgttcgttccttctggtgggttcgtggtctcgctagcttcaggagtgaagcttcagaccttcacggtgagtgttacagccgttaacgtggcgcgtctggagttgttcgttccttctggtgggtttgtggtctcgctagcttcaggagtgaagcttcagaccttcacggtgagtgttacagctcatagaggcagtgtggacccaaagagtgagcagtgacaagatttattgcaaagatgaaagaacaaagctcccacagtgtggaaggggaccccagtggattgcctccgctggctcgggcagcctgcttttattctcttatctggccccacccacatcctgctgattggtccattttacagagagctgattggtccattttacagagagctgattggtctgttttgacagggtgctgattggtgcgtttacaatccctgagctagacacaaaagttctccacatccccactagattagctagatacagagcgtctacacaaaggttctccaagtccccaccagagtagctagatatagagtgtcgattggtgcattcacaaaccctgagctagacacagggtgctgattggtgtgtttacaaaccttragctagatacagggtgccgattggtgtatttacaatccgttagctagacataaaggttctccaagtccccaccagagtagccagatagagtgtggattggtgcattcacaaaccctgagctagacacagggtgctgattggtgtgtttacaaaccttgagctagatacagagcgctgattggtgtatttacaatcccttagctagacataaaggttctccaagtccccactagactcaggagcccagctggcttcacccagtggatcctgcaccagggccgcaggtggagctgcctgccagtcccgcaccctgcacctgcactcctcagcccttgggtggtcgatgggactgggcgctgtggagcagggggtgrtgctggtcagggaggcttgggcctcgcaggagcccaccgtgtgggggaggctcaggcatggcaggctgcaggtcccgagccctgccccgcggggaggcagctaaggcccagggagaagtcaagcatagcagctgctggcccaggtgctaagcccctcactgcccgggctggcggggcccgctggctgctggagcgtggggcccgcggacacccacgcctacccagaactcacgctggcccgcaagcaccgcrtgcagcccgggttcccgaccacgcctctccctccacaccttcccgcaagctgagggagccggctccggccttggccagcccagaaaggggctcccacagtgcagcggtgggctgaagggctcctcaagcaccgccagagtaggcgccaaggccgaggaggcgccgagagcgatcgagggctgtgagggctgccagcacgctgtcacctctcaccgggttcaagcgattctcctgcctcagcctccccagtagctggaattacagacgtgcgccaccacactccgctaatttttatttttagtagagacggatttctccatgttggtcaggctggtcttgaactcccggcctcaggtgatctgcccgcctgggcctcccaaagtgctgggattacaggtatgagccactgcacccagcctttactgtattttttagcagaaagaaaatgattgcattacagtggttatttttaagggccccaacctccactttgtcctgagatctacgttgtgttgttttcagtgttttaacaggcctttttatttttataaatgccccagaagttgtagcgcagccctaactttctagcaggacttttagaagctgacaattttcctaagtttcattcacatcacatgaaggcagcaattgttaaaatatatttagattccattagggtacattttgctatcacattgaagtctctcaagaatcattttattcccatcagatgttgttactgagcagtttctagtgctgaacatgactaagaacctttaggtggtgctctttgattaaaaacatttatccctcaaacaacttaaatacagtagtatattgcaggaaaaagtgacctttatttttttagggatgatctcccaggtctgctcaatttttctgccatttctattgcagaggctaataatttgcccatctcctcccagcccaagcaccccaagactgatacttttctatcacctgctgctaattttgcctcccaaagagtctcccatctcgacgcagagagaaccttcttagtggggtcacagcttcccttgcgtccaagagctgtctgtcccacagcctggtcagactcccacagcctsgtcagactcccacrgcctcaaaccccaggtttgccactcacttcctcactcactcctctttgctcatttttctgccaacgattcgtcatgtatttctaggactatctgctcacttctcaccccttactttttttgttttgttttttgagacggagtctcgctgtcacccaggctggagtgcagtgtcacaatctcagcccgctgcaacctccacctcccaggttcaagtgattctcctgcctcagcttcccaagtagctaggattacaggtgtgcaccaccacgcctggctgcttttttttattcttagtagagatggggtttcaccatgttggccatgctggtctcgaactcctaacctcaggtgacccaccaccttggcctcccaaagtgctgggattacaggtacaagccaccgtgcccagccccagtccttacttttggttgagggttacctttcctttcattctggctaaagagttgaggtcagttggaaaaacccagactcaatcttccttttttttttttttttttttggagagagtctcactccattgcccaggctggagaacagtagcacaatcatggctcactgcaacctctgcttcctgggttccagcaattctcctgcctcagctgccagagtagctgggattacaggtgtgcaccacctcacccggctaatttttgtatttttagtagagacggggtttcgccatgttggccagactggtctcaaactcctggcctcaagtgaccygcccacctcagcctcctaaagtgctgggattataggcatgagccaccatgcctggctgatctccctaactctaaatctttacccctctgtctctaaagtctggccacctttttaattcttttagagacagagtcttgctctcacccaggcttcagtacagtggcataatcgtagctcactgcagcctcaaactcctgggytcaagtgatcctcccacctaagcctcccaagcagcagggactacaggcacatgccactacactgagatgtttttttttgaaaagacagagtcttgctatgttgcccaggctggtctcaaactcctggcctcaagtgattctcctgcctcagccttccaaagtactgggattacaggcgtgagccacagtgcccggtcctgatcaccttttctccatcacyttttccctaacacttagtttccctttctccatcacttcttccctaacacttagtttccctgtccccgactttctcactactaaaggacccctacattcctctagaaaccttgtgggactagattcttctgtcacataccctattcttaaaaataacaacaacaacaaaagccaatttaaatactttagaagatcatacttttcaaagattttactaaatcatttttttaaacaaaatatacattaaatctcagatttacagaatatagaaataatttatccaaagaaatttgcatttaawattgttaatattgcacccaacagtatgtctttgacacatttgcattgtcaatctttcccacaatttgcaaaaacaggagagaaatctgaaactaacagaattacacaagctaagttttctgtaaaaaaagaaaaaacttacaattttttatttacaagttaaggaaaagttgtaaacgttcaggattttacttccacagaataaaaagccatayattcttttatcatacctagaaaatgaacatatacacattgtgattacctcataggaattcaacaggactgatattgtgaacattcacagcccaatggtaaaaaacagaattctcgaactatggaaactagtgtgtgaaagacacagaatgagaaaaatgtctggaaaaaaattactttctcctctttgaggagtttccataattacctaaagtyatcttcaaatttaaaaggacacaccattccccagtcttaggaatgtggctgccaataaccttttctctcgacataagacaagtgaaaaagagtgaggtctttgttcaagtccctgataaaatactttgcatataggcaggcacaaaagtttgctttccaaaagaaagctttgcaaaatattctgcaatttattactgatatcctcagtttttaaaaaccccctttttaagcccataaatatttatatgctttaaraaatgagagtagggaatcaaatcatttggtactatgggaagctgctaaaataatatttgatagtaaaagtatgtaatgtgctatctcacctagtagtaaactaaaaataaactgaaactttatggaatctgaagttattttccttgattaaatagaattaataaaccaatatgaggaaacatgaaaccatgcaatctactatcaactttgaaaaagtgattgaacgaaccacttagctttcagatgatgaacactgataagtcatttgtcattactataaattttaaaatctgttaataagatggcctatagggaggaaaaaggggcctctgggaaattatgctgaagatcacmgaaaggaaaatgtaactgtaattttataatacaataccatttgaactgaaatacaacatgctttgtaattctattgccctggattgagactggattaaaacgttccctttcaaccataatgtacataaccagttgaataataggacttttattattattaaaaaattttttttgagctggtgtctcactctgttgctcaggttggagtgcagtgccacgatctcggctcactggaacctccacctcccaggttcaagcgatttccagctaatttttgtatttttagtagagatggggtttcaccatgttggcygggctggtctcctgacctcaagtgatccacctgccttggcctcccaaagtgctaggatgacaggcatgagccaccatgcccggcctatttttaaatttttcttaagacagagtcttgctctgtcacccaggctggagtgcagtggcgcaatctcggctcactgtaacctccatctcccaggttcaagcgattcttctgcttcagcttctcaaataggtgggattacgggtgcccaccaccaagcccggctaatttttaatttatggtagagacagggtttcaccatgttggctgggctggtctygaactcctggcctcaggtgatctcccctcctcagcctcctaaagtgctgggattacagacctgagccaccacgcccggccgaataataggacttttaaaagtcctatttcttggctctgctattgtttaatagtccaacccaaggagtttgttataaagattatttattgtcttcaatatctttgtgatgaatgcaattcacacacacacacaaagtcctgagagtctttcataaaaaaatagacgtgctttgtggccgcatcccagcctgggggtaagggatcagctgtcccckgtgcgcctgtactccgcggtgccatccgccacgatggcatcaagyggcgagcgcttcttgcggatgctgcgcccggaggagatgaggtccgcgtagccccgctggtgcgagaaggcgtaggccgagcgccgcgttgacacgccccggcggaacacctgctgccgtcgctgccactgctcctccgccttcaaccgcttgcgatgcttctggatctgcaagggggagaratggggagggatgaaaataagatccacaccagggaggaggcctggccagacggttgacagaaatgaacactgatgaactcccctgacacctgccccattttgatgcaggcagttctgtccccacttgtgtgtgtgtgtgtgtgtgtgtgtgtgtgtgtgtgtgtgtatgtgtatgtgtgtctatatctttttttttgtttttgagacagtctcgctctgtcacccagacttgagtgcaatggcacgatcttggctcactgcaacctctgcctcccaggttcaagcgatcctcctgcctcagcctcctgagtaactggggttacaggcacgcactgccacacccgtctaattttgtatttttagtggagacagaatttcaccatgttggccaggctggtcctgacctcaagtgatctgcctgcctcggcctccaaaagttctgggattacaggcatgaaccacagtgcttggctatatctatctatctatctatctatctatctatctatatcgacatatatatatgatgatataaatctatatccatctctctatatctatacatagattgattgatcaatcgatctacctacctacctacctggagatatatattgaagccaagggaaggttatttaacttttccaaggtcacacagctagaaaatgcaaagccaagattcccactcctctgaagctagtgcccttttctagttcagaccagatgggtacagtcaaagagaaaattcagtagggcctctttcctgggttgttactgcatactgttggcactgcaaaagggagacccgagggatactgaaggttgcctcagtagcctctactctctccttctttctaatggaaattgattgtattcagattgccccccccaacccctcacagccacatttctcatgggcggtgggcaggttgatttcccttgctaaactagtccagaatgggcaagtgacctaattttggcacgtgagacctgagggcactgtactggggcccttgggtgagaagttccacggcccctaaggagctacagaataggctcttatctccccccgacactgataggtcaggaagtgatacccagaactgctctggccatcttccagcatccatatgaagctaataatgaaggtttctgagagaagagatggcaagaaccagcccaatcctttcttgacaacattaaattgctcaatcaactgggcctgaagcctactaatgattaatgatgaygcactactgtagagatgttttgagtcacagctttctgttccttgtagctcaaaggatcctgctacagaaggtgacatttttcttaaataaagaaaaaaaacccaatctgatttgtatgacaaaatgttaatactgtaattgttaaactgaggagatagatatatggggctcattctgttctcccttttttgtttatgtttggtaatttttgtattaaaaagcaagcacactaaactcccaattccaaaagacttatttgtgagatagagttaaagagaagcaatcatgaaaaatcattcttaccaaacttcccatgagcttagaattttgcaggaaacgtgctgttgggaaacgctttggtttctgtgagggacagagttgggaaaggactatattmtttataccttatcactttctgatggccagatggtcattgacaggaatcgaatggcaacgacgggtagtaagcacacagcaacagycaggatgatagttaaccaaatgtatggctgtctcagagcgtttgaagctgtgcctgtaaagaacatggcaaatgcatcactgtggttcttttttcctaagaacatagttaatatttcgccaggtgtggtggctcatgcctgtaatcctaacactttgagargccaaggtgggtggattgccagagctcaggagttcgagaccagcctgggcaacatggtraaaccccrtctctactaaaatacaaaaaatcagccgggcatggtggtgtgcacctgtagtcccagctactcaggagacagcagaattgcttgaacccggaaggyggaagttgcagtgagccgaaattgtgccaccgcactccagcctgggtgataaagcaaaactctgtctcaaaaataaaaaataaaataaaaaaaagaacatagttaatatttcataatctataaatagatcatttatggtaaagttttacaactggattggcctccccaaaatatccattatggctcaaagaacagacattttaaaatcagactaagcaaagcaaaattgggaaggtaaattatttgaaacaaggcaaatttacataagtgagcaaataaggaaaaaaagcacatttgttgacattgcattgattaaaaatgcaaagttaggtgatcaagacttctgacttttttttgagatagggtctcactctgttacccacgttggagtgcagtggcgtgatcatggctcactgcagcctcaacctcctgggctcaggtgtcctcctaccttagcctcctgaatagctgggactacaggtgtgcgccaccacgcttggctaatttttgtattttttgtagagatggggtttcaccatgttgcccaggctggtctcaaactcctgagctcaagtgatccacccatattggcctcccaaagtgctgggattacaggcgtgagctaccacatctagccccagtattaggttttatgggaaagaaagaatargcttttatccagccttttaagtcttaagttatctaattcaacacacgtacagcgctattgtaaagctattttaatttgtcttcctcccatcatgttatgccctttcaacccaccatcaccatttaatttccagacaagacattaattttcactagcaataataatttgtatatatttgttttgttgtgctttgttttttttgttttttttttgagacagggtcccsctctgtcacctgggctagagtacagcagtgccatcacgactcactgtagcctcaacgtcccaggkcaagcaatcctcccacttcagcctctccagtagctagaactacaggcatgtgccaccatgcctggctaayttttttgtattttttgtagagatggggtttagccatgttgtccaggctggtcttgaactgctgggctcaagcaatccacttgcctcggcctcccaaaatgctgggattacaggtgtgagccactgtgcccagccattccaccttgtatattttattacttaacagaagttatgtcaaaatctaaactaatgacatttgtctgtacatttatttttggaatttggaaataccaacctgtaaattgaaatgcagatggaaagagaacatgtattccagcactatgaaagtcaaacatgatgccaaaataaagtgcaatgcttccaaaaattgaaaaagcattcacaaaagtccaataagaagtatccaagccaatctgttgggaaaccagagaaaaacagagcactcattttggrgagttagcaagaaataaaggatctaacmatcctgaaaacagaattcagcaagttaggcatgatgtggcttgaatactggaccagaaactaaaccatccttgactcaggcaagaaayagaaaatgtgcttggtataagagatgaaaatagcatttatattttgtaagtggcacaggtgcagtgggagtcaggtggatgtgcatgccaccctatatacagaaatataagtaggtaccaatagacactgaatacggccaatgaaagccacgtacctggaaattgactgttattacaagagcagaggcaatggtgacggcaaaagactggtagtcggaaggtgcctctccatcctgccctacggtttgcagataagctccaagaggtatgaagaagaggatcatcgatgttaggaccccatgcaacaagcttacaaagaatctcttatagttgaatagtaagtctctttgtcccactatgtataacccagggaatcggaggctcagtttgtcactcacatccttaaggakaaaacaaaatgatggtattttattcatcaggtcaaagcagtcagagatatgttataattaatatctcacaaaaagttgcagcctgctgttaaattttaggaaggcaaaaactgaacaagataatcgatcaatcctgcaatatttgtggtgtgcagagctcaacctcattgcttagaccaccattacttaatatttaattcagagaagggctaggtataagtttattactttgctacttatggaaagaaaacaaattagtaatgtccaaaaatatgtagggaggctactgtttttacctcctgagtgaatatatattgttgcaaatcctttgggaaaaaattttctcatacaagttgatgagttaattataaattattactttttagtctttatagtgcttctttctttttaagaattggtattagataaaaatatgcactagctacataaattttggaaaggatttaaactgactttaaaatgagtaaattattattgtggagacatattggactctcgggtgcctttttttccttttcttttctttttttttttttttttttggagacagggtctcactttgttgcccagcccggagtgcagtggcacaaacacaactcactgcagcttcaaccttccaggctcaagcgatcctcccacctcatcctgccaagtagctgggacttcacaggtgtgcactaccatgcccacaatttttaaatttttctgtagagatggggtctccctatgttgccagggctggtctcaaactcctgacctgaagcaatttgcctgcctcagcctcctaaagtgctgggattacaggcatgatccaccatgccctgccttcagktatcttcatagtaagctcttactgtctaaaaggaacataacaaatatgtgtgccaatgaattcaacccagtcacagaaatcctcttttctctttttttttttttttttttttgtcttagagatggggtctcactttattgcccaggctagacttgaacacctgggctcaagtcatactcctgcatcagcctcccgagtagctgggactacagagaaatcctctttccttattacaaaacaagaagcacagccatgacccttgatgcctgacaacagaattataatagggtttgatcagaaagaagtaaacaccagaagaatgcattgaaacgtttgcttgggacttctctaacgcattctcatctgtccagaagtgtccctgcttgtgcgaggctcctacctggtcgagcagccccatgaggagcacgggcaggctggtgtacagcacgttgtagagggtgatgaaccaatcctcgtatgcagtctgtgaggggatgacagaggctccatgtcaccaacaaagacacatgccagcctagttagcacatactcatctgcttcctttatttaacattttgtttgtttgtttgttttaatagagatgggggtcttgctatgttgcctaggctggcctcgaactcctggccttaagcgatctccccatctcagcctcccaaagtgttgggattataggcaaaactctatgcacctggcctgttatcaatattctttttttttttcttctgagacagagtctcactctgtcgcccaggctggagtacagtggcgtgatcttggctcactgtaccttctgcctcccaggttcaagtgattcttctgcctcagcctcccaagtagctgggattacaggcacacgccaccatgtctggctaatttttgtgtattttgttgagayggggtttcaccatgttggccaggttggtctccaactcttgacctcaggtgacccgcccacctcggcctcccaaagtgctgggattataggcgtgagccactgcacccagccctgttatcgctactcttaatgtcaacatgaaaaaataaccaaagataaagataaaaacatacaagcaaatcccctcctttttttttttttttttgagacaaagtcttgcccaggttggagtgcaatagcgcagtctcggctcaccacaacctctgcctccyrggttcaagcgattctcctgcctcagcctcccgagtagctgggattacaggtgcctgccaccacaccckgaaaatttttgtatttttagtagagaccaggtttcaccatgtcggccagactgatctcaaactcccgacttcaggcgatccacctgcctcagcctcccaaagtgctgggattacaggcgtgagccaccatgcctggccaaatcccctcctttctaaggtaaaatgtttttacagcaccagaaacatttagagaagtcatgatcattcttaattatgccccaactgtaaggagacacagccccaaaactacaaatatagaagaaataaattgtcttttcagaactagwtttttattcatttaagagctctacttagtaaataacaataataacaacattacattacctgcgcagagtagccattgaagaaggagtaccagaaatgaaccaaagtaaaggcaaagtttttgtaaaagaagtatygtaggaacttgcacatccttatgtaagaccatcggccatgcaccagcagtagcctctgcagatatcggaactgagcaaaggaatagtcactcgacatgacagcttgcattccttcttgtccacttattccaacgccaatgtgggcagctatggggcagagggagaaaacactgtggatcataaaccgattgtgaggcaaaacatcagttgataaaaatggttccatagcaaacaaaaaacaaagacagacattgatggaacaataatacagaagctcttgctcaccatccctcacccccagctcttgaactcaactcaaagtctgagttacaagttgctaaacagagcacacagtagggcctccataaatatctgggaaaggatctcatgtgggtgacgaattccatttggattatctgccaagatcacagccatcccttccatccacagggtgagccccaggcacccatgtgtacactgtgtccttgcctctttggcaacagctgtgtcagtcatgggcagatatgtaatttgtggtagatactacaaatcggctcccccaacttcattccatccttgttctaattagagaggtgggaaaggaaataaaaaccctacatttcccagactcccttgcagctaggctctttgtgaattaggttccactgtttagatccacttatgacttggaagcagaagtgaatcagagcccagcatcgcttcctcttttgggatttctgcagcagagctcatatctactttccagctacctggatgttgacaggcaactataaaggcttcttaatttggaagctctttagaggaacctcttaycacttaccagaagagtagaagctcttctggtaagtgacccagcctagaccctgcttctgtagaccatccagagcttttgaaagtacctagtcccctgtatgaatcttttcttgcttaaataccaactggggtctgtttcctgtgctaaaccctgactgacagaaaacccaagctgagccagtctctctcttgatattctggaattagaagtcagttattttgtgtctagaattttaaggtctaaattcttgaggtaagaaatagttatatttctttctctctcttttttttttttttttgagatgaagtctcactctgtcacccaggctgcagtgcaatggcgcagtcttggctcactgcaacctctgcctcctgggttcaagcgatactcttgcctcagcctctcgagtagctgggattacagatgtgcgccaccacacccagctaatttttgtagagacggggtttcaccatgttgtccaggcaggccttgaactcctgaactcaggtgatccacctgccttggcctcccaaagtgctaggattacacacatgaacaactgtgcctggccgaaatagatatatttcttcctgaagatttctaagggrcagagaaataaagtagtggggagagaggggtggggaggagggagagaatggrgggagagaatggggggagagaagagtggggagagaagrgtggggagagaagggagggaggggagagagagaaggaggggaagaaggaggaaagggagagagaaggggagagagacagacagacacggggttcctggtgcaaatctatgtccttgttccagtatcttcctgaggcctggcttcttcttggacaacaggaggtgtttaaataaatttacttttttcttttttttcttttaagttacaggatacctgtgcagaacgtgcaggtttgttacatgggtatacgtgtgccatggtggtttgctgcacctattgacccatcctctaggttccctcccctcgtctcccactcctcaaatttaattttttcttaagctagctttggttgttctccaatacttgtaatcaaaagagttttaaccaagaaactattaaactttcaaagtcttattcatggccctctgggaccttaagacattttttttttctttacgggggaaggtttccagaatatataaaattaaagtcacaattttatttatgcttccaatagtcataaataacactttcaaattagagaatgattagttttgtctgggtcttaaaagtaacgaatgtgaagatagacaagatcatttagaaaagatatgttggagaacacaacctatcatkgctcagaccctgaaaagtggctgcaatgctgcggcgttccaactaaaaagaagcttcaaaaatcctgccctagttacagaacacaaggtctggcaaattcaaaacataactgtagtgatgtatccaaacctacgttttcagtaacacttctaaaaaaacagaacaaactgcatctcatataatatttatgttctctttgaaaacacacaaatatttcctatgaccagcatggttgccaaacttgctctttcctgccaaaccatggccttttctttcctgaacaagccactgaggaaaatgctgagattctcttggcttatgtggctgaggaagaggaagccctgccccaggccctggtatccagtcctcaaccttcccgctgagcagaccaaggacaaatgtgaaatgaacactgtcatagttcccagggcaaccaaaagcactgaacagatacactataaggtaacattggtcttttttgtaaaatttaagtacaggcatttagagtttcctgaaatctcaaatgcggtgttaggtgcctcactggtagacattcttttatcattccttaacaaaaagaatatttcctcgctacagcaataatccctcttgcctttttttttttgagatggagtcttkytctgtcgcycaggctggagtgcagtggtgcgatcttggctcaatgcaacctctgcctcctgggttccagtgactctcctgcctcaggctcccgagtggctgggattacaggtgcccgccacccccatgcccggctaatttttgtacttttagtggagatggggtttcatcatgttggccaggctggtctcgaactcccaacctcaggtgatctgcctgccttggcctcccaaagtgctgggattacaggcatgagccaccatgccccaccttgcctttatctctctcctgcttcacgtacattctcagggtctaagaccaagaagagacaacatccacccagctggtatgagatatcttcaggtaggatagagggagaaggcagcctatgatagtccttggatccttgctaggggcagaaacatggtgggtcatgattccttcacttcttccagactacactgctaaacgtgaatgttagcaaatgctcagattattttttgacacttgaataatttyactcgactactttatgaccaacaatttctttgtgtgtgtgtgtgtgtgtgtgtgtgtgtgtgtgtgtgtgtgttcttttktgttgttggagaaagggtcttgctctgtcacccagggtggagtgcagtggcacaaacatggctcactgtagtctcaacttctcaggctcaagtaatccttccgtctcagcctcccacgtagctgggactaccrgtgtgtgccccatacttggctaaactttctgtatattgttattgatgtggttggaagaaatgacagcttttacaaagtacataaaggcactaatactacttgtataacttctaaggagacccctaaagtttcctatatttttatcccaaagggatgctctataacttatatataaaagtacctggggccaggtgaggtggctcatgcctgtaatcctagcactttgggagactgaggcaggcagactgattgagcccaggagttcaagaccagsctgagcaacatggcaaattcccaactctacaaaaaatacaaaaattagctgggcatggtggctcatgcctgtagtcccagctacttgggaggctgaggtgggaggattgtttgaggccaggaggtggaggttgcagtaagccaaggtcatgccactgcaccccagcctgggccacagagggagaccttgttttttttttaaatgcacctggcatataacagtgcttaataaaaattttaagacaacttaagaaaaacaagcccctctaagattatctacattgacttkgtgcaatccctctcattatgtattggtgaactcagaggaacaaaatgtttcaagtctaagtcacataatcagttgataaatctccaaagcaaacccgtcccctcccattatctagaaggctactttataactgaataaaaatcatgtttgacttgtcmttttggcacggctagttacgttaaaggtacgtaatggaaaataaactagagctggctggctatggaggaaagagatagatctaactccgagcaagcaataccattcgcatggtagggcaagcacatgcaaaaaaaaaaaaaacagtgtggatgaattaaactgctagtgaccacagacatacgcactgataaagaaggcaagatgacatacgtcatacagctgactcctgttgaggaagataaagttggaatattcttagtatacatcaaggaggaggaggagactaagaaaagaaagagacagactcatgagtcacaaaatagactgaaaagtctagttatatataatgcatttaagcaacccagcatcacaggaacatgcaattacctatgtacagtcaggtaatacttcagctcagtgataataatacgacagagctggaggtgacattagggattattttcttttccgatgagaaaactgaaacctgagcataagcccaaggtgacaccggattttggcaataggatgaggaygaatatccaggtcattagtttgagtatttttaatacaagatactcccttatagtgacagagggaggaaaaaggaacagaattcagacatagagatgagggctgtgggtgtgcttctgcaggctttaataccagcacaactgtatttctgcatggcaggactcaatattttaattgtgtggacttaaattctagcatccagaaaaaggcagccttctagggaggtgaggaggatgatgagagcacgtggaagcttttcttcagtgctaaacatgttactctaaactcacaccaggtgacccaatgatgaagttcccacagatttaccaaaggtaggaagaaagtcccagaaagaaatgcttagatgaaggagaatgatattgtcaaagcaagcaccagccagagttcaataatttatgtcttacaaaacttattaaatatcagggttttttgttttgttttgtttttttgagatggagtctcactctgtcgtccaggctggagtgcagtggcacgatctcagctcactgtaacctccgcctcctgggttcaagtgattttcctgcctcagcctcccgagtagctgggattacaggtgtgcaccaccacacctggctaatttttgtatttttaatagagacggggtttcagcatcttgatcaggctggtctcgaactcctgaccttgtgatccacctgcctcggcttcccaaaatgctgggattataggcgtgagccactgtgcccagccaatatcagggcttttaataaacccaaaatatgggaagagaaccagtaagagagaaaaaaatacacaacatctatataaaagaataaaaatataaggataaatttccccccatagaccttattttcctcttcgcatccttcagaagccctgtcagtgatactctttcctcctgatgggctgtgggctttctgggggtagggtcacaggcgttgtcatggttaagtgactttatgaaacatctgctctatgaaaacctaagctgtaaaatctaaaaaaagaaaatccaccccctacacattccagccatttctcctctctagcacrttgggcctcactggccgtgggtgcatgactcacttttgatcatgttcacgtcattggccccatctccgatggccagmgtgatggctttcttgtacctcttcaccaggtccaccaccatggccttctgcttgggggtgacgcggcagcagatgactgcgctgcactcgcaggccaggtccacaaagtttttctgccgctgctctttcttagcttctagcctccttttactttgggtccgcatccgtctttcttcttctgttcttgggaacttcagcttcagaatcttatttctcttggtctttttctcgagaagaatttcattctgtgaaatcagagagggaaaaggttacattcactttagttttaccccaggagtaccattcccaagatttaaattatgtgaaggataatttttggattatgtcactgattatatttgacaaataaatttgattttataaccaaaacatgtatatatatgtggcgtgtgatgtacacagtgtttagtgtgtgtatgtatayacacacacacacacacacacatatatatatatatatattwtwtttttttttttttttgagatggagtctcactctgttgccaggctggaatgcagtggcacgatctcggctcactgtaacctctgccttccaggttcaagcaatttccctgcctcagcctcccgagtagccgggactacaggtgtgcaccaccacgcctggctaattattttttttgtattttagtagagacggggtttcaccatattggccaggatggtctccatctcctgaccttgtgatctgcccgccttggcctcccaaagtgctgggagcacaggcgtgagccactgtgctcagctatatatatatttttcaatggagatggggtcttgctgtatagcctgggttgaagtgcagtggctattcattcacaagtgtgatcattgcatgctgcagcctcgaacacctaagctcaaaccaccctcctgcttcaacctccagaggagctgggactacaggcgcatgccaccacatccagcttataaaatatatatgcaacaaaaatttagaaaatctaacaatctataaagaagaaaatgaaaaaacccattaattagtaaaccaagataaccacttttacctctttggtatacatcctttcatatatcatatattattaagtctcaaacttggaaaaaccacactttcatgtataggctaagagacttttaggttggcagttaacatgtgaaagcatctaaaagtggctccaaatgaacttctttcttttgagttaaaggcacagatacactaatgatacgtaccaaccaagaaccagtgatgattaaggcacggtttccaccgggtggaaaaaaagattcctgyacaggaggtgcaaactttgcgtagacgccacctctattcctctggttttccatccttgcatgaagaagagaactaggggaaaccaaatttcagtgtttaaagtgtaagaccctaaataggcccttgactctgagataactttgacttaaaaaaaattgtgacaaaaaaacaaagtttaccatcttacctatttttgtttctttattttattttcattataatttttttgagagagggtctcactctgtcacccaggctggagagcagtggcatgatcatggatcactgcagcctygacctcccagcctcaagtgattctcctgcctcagcctcctgagttgctgggactataggcacacgctatcacgcctggctaatttttgtattttttgtagcaatagggttttgccatatcccgggctttgaccatttttaagtgtacaacttagtagtgttaactatagtcacattgttatccaaccaatctctagaactttttcatcttgcaaaacggaaactctatacctattaaacaataacacctcacctcactcgccctccagtccctggtaacttccagttaactttctgtttgaatgaatttgagcactctagatacctcatatatgtgaaatcaaacagtatttgtctttctgtgactggtttatttcacttagcttaatgtcttcaaggttcatctatataatatatgtcataatttccttcctttttaaagttgaatatattccattatgtggaagcaccacattctgtttatccattcactcactgatgggcacctgggttgcgtccatctcttggctgctgtgaacagtgttgctgtgaacatgggtgtgcatgtatctctttgagatcctgctttcaattattttgtggatatacccagaagtgggattgttgmatcatatggtaatcctttttgaaattttttgaaacatcaccatactgttttgcatagtggctgcaccattttatatatttcatcaacaacacacaaaggttccttcaacaatgattgttattttctattgtgttttgtttttgatagtagccatcctaaagggtgtgaggtgttatcttgctttggttttgatttatcttcccctaatgattagtgatgatgagcctcctttcacatgtttatcagccatttgcatgtcctctttggaaaaatgtctactcaaagtgctttgcccattttttttttttttttttttttgaggcagagtctcgctctgtcaccaggctggagtgcagtggtgttatctcagctcactgcaacatccacctcctaggttcaagctattcttccacctcakcctcccaagtagctgggactacagacgggcaccaccaygcccagctaatttttgtatttttagtagagacrgggtttcaccatgttggccaggatggtctcaatctcttgacttcatgatccacccgcctcagccccccacagtgctgggattacaggcatgagccaccacgcctggccagcccttttttttttttttttttaactgagcgacatgtaattttactatgtctcgattcrtccaccatgggggtaccatgtaattcatcatttttcaaagacagtcaaaggaagatacagttgaaaatgtatacacagcaacagaagaaaggcaatcttaggccaggcactgtggctcacacctgtaatcccagcactttgggaggctgagacgggcagatcagtcgaggtcaggagttcgcagccagactggccaacatagtgaaactctgtctctactaaaaatacaaaaattacccaggcgtggtggcggtgcctgtaatcccagttacttgggaggctgaggcatgaggatcacttgaacccaggaggcggaggttgcaatgagccaagattgcaccactgcactccagcctgggtgacagagtctttctaagaaaaaaaaaaaaaaaaaaaaggaaaggcaatcttgatctgaattagaatactggctattgtttgttaggaataaacttattttcatataaacaaaactatatctgtgtttgagaaattctcagtgctttatatcaacaaattaaatgtttgtgttaaaatgatatatgtgacaaggctacrtgtaacactttcatgtgatagaaaaatgagtcatgaaattttggagtggaagggaccttaaatatcttgtycaatctcttcatgttacaaataaggaaatcaagccagaggaaggtgatgtgatttgcctgctgcaggttgataggaaaactagaatgaggactcagttatcttgtaacttctggctcaggactcttactattacatacaaaaagccattgttcttctccttccaaagaaggcttctcagcctttgcactcttgatgtcttgggcctaataatcctttattttgtgtggccatcccttgcactggaggatgtttagcaacatccctggcctctacccactagaagccaggagcacttctctgcagctgaaacaagcaagtgtctctggacagtgccaaagggtccctggaaggcaaactcactccccacggagaatcactgcactagaggattaagtatctagtatcccttttccacatcaatttaattctcattttcaagttaaaagtgagtgactaagacaaatcattgaaaggccrttaagagaaaaaaaatgaagataccttctattcaaatcattttataggaatcatcaatttaagagccacctgggaagatgattcctctctctataaaggtaaactcagctaagggcatggtcacaacatttgctacttgcatacattttatcttttactttagcttcgggaccaatttttaagactttcaaaagagagaccagaaatttttttacagccccatctacaaaaaataaacaaagccatatagtaattaatcagattacttgaagcccaaaactactaaagtaaactcattaagcattaagcatttatttgtctgttgctactttttttttttgagayggagtcttgctctgtcacccaggcaggagtgtagtrgcactatcttggctcactgcaacctctgcctcccaggttcaagcaattctcctgcctcagtctcccgagtagctgggattccaggcacatgccaccatgcctggctaatttttgtatttttagtagagacggggtttcatcatatcagtcaggctgttctcaaaatcctgacctcgtgatccacccgcctcggcctcccaatgtgctggtattacaagcatgagccaccgtgcccagcctgttgctacttttttaaaacctaaaagcacaaaggggcatggcttatgtacctctatttgggcacataaactaaatcagttctaaatggaactgatttagatcataaggctactgattttgtctaatttgacggaatacctaatatactagaacaactagaaaatgctttatcaccatcattagaaataagactaatattgaccatcaattccctcrtcactttatcacacctggcaaatgtgtatgttaacagtttaatctgacctcatgctggcctgagagaagctctgtagggaaaaatcttgaggaactgtcaggccatcagtaaacacatcacagtaactgtgtgcagcatatttatagcttcagaacaagacagggctttttcatcatacatttccaggtctgctgcgactctgattcaaagctaacaaacgtttcagcatatgctaacatttgaattatcaggcctgccccacctagactagattacaggggacctacatgatgtaacccacccacacatttccttcccgcaaaagttttgggttttttttttcctttcttctatttccctttcaaaagtaaaagttcctagaaaaagcaaaataggactataattcatattaatttgctagcgatattacaggctttttacggawtttttagtaggtgaaccgagtttttttttttttttaatgagacagagtttcactcttgtcacctaggctggagtacagtggcgtgatcttggctcactgcaacctctgcctcctgggttcaagtgattctcctgcctcagcctcccgagtagctgagataacaggcaccgggcaccacacccagctaatttttgtagttttagtagagacggggtttcaccatgttggccaggctgctctagaactcctgacttcaggtgatccacccgcctcggcctcccaaagggctgggattacaggcatgagccactgcgcctggcctgagctgagaaggaatggagaaaaatggcctctgaaggkccccaagtttccmtaaaagtaaaatctgctcaaatttaggctgcaccttgattacttggaactgcctgttgttgtcttgcctcatttaaacatgaggaaactgccccaagtgacacatcgtaacccctatttcttcatatctgctatcttctacagacagtcttgcatttgcaaagatgagctattacrtaatttcatactgcaggcttttactcacttaatatcctccccatagcagatggtggtgtcttcagtcagaagttcacaagcaaatcctatattttcagcagtttctacaatagaataaaattaagtcaaatgtcattcctgctgtttttattttattttattttgttttttgagacagcatctcactcccactgcctaggctggagtgcagtggcacratctctgctcactrcagcctcaacctccaggattcaagtgatctgcccatctcagcaccacccrcagcccccaagtagctgggactacgcaactcgctgccaagccaccaaacaatttgtgttttttctagagatggggttttgtcatgtttgccaggctcattcttactgttgaactgaataattgattttacctagtaatgatattttttagttcatgaacataaccagattcacacaaacacactatttttctatagcaatctgtaggaatcacatgcagaagaaaaatccttttctccataataaaacaagtgaaagtcaaagtctaatttgaaatgttttcaataataaaatgtgctatattatcaaacatataaactggttatttagtaaaccaatgttcattaaattactaaacactctcagttcctggttcaattactctgttattggcggggggcgggggcagagggaagcataataatttccaccaacccttacgtgaagattttttttccttttaaattaccacccaatttggcatttatttaaggtcagggctgtgcttcccataactttgcagagtgtgtaacccgttgacgatttcagcgcaagagacattatttgatttcttgtggaaggcttacaaagtaaagtatcaataccaaacaagtgcttgttgagttctaaagttaaaaaattaaaatcgttctttccttaggtrtacaattttattgccaagcaataaaattggcaagaaaaccaaagttattgttcagtactttgtattgttctactctgtgcccaccaaatgtcaaagcactggaaggacagagggacaagagggatggccctttcaggacgggaacccacgtctggctggagagataagaccrattataatcagcaagacatggccaggagctaaattataaggaagaaactgctactgagggggatcaggaaaggatgcagaagratgtgctggaaaaacagaggagggtttctcagaaaaagcatcttccgtccaaagaaacagtgtttgtacaggatgaaaagtctgaggaggtcatcttgggcaaaggaaacggcagctataaatatttgtgaattaacagatatgcttccctgcacaatgaattaccctttttgtctccagtaagcacccagatcttaatgtcagcttttgcaagttttgaaatggtttctggaactccatcctgtagcttgtcttcaatagctgtagctcccaggagctagaatgtatattaaaaaaaaaaaaaaaaaaaaaggaattagcaaacaaaccaaaagttttctgtaattacaggttgccaacctgtaaaaagaagggctaattatacatcctggttgctgctctcctggggccaatggccagtgttaacagggaaggctgccatgtttcacaattactgcaaaccaacacasctaaaaactttttccctaaaggatgaactatttaatttaccaagacaaaaatgcaagtacaaaatcaaggatgttaaaaatacacttttcttgtgtatttgtggctttatactgacataaaccgtaaaccagttgcaatactagctatttgttgaatattttccacttatctaaaccctacaaaaactatgtattaaatttggaaaacttttagaaacaatatatttttcttatttcaagattttgcagaatatgaattgtttcggtaattcccccaatgtaataagtattagatgcaggtttgttattgtttaaaaattataataaattttaataagtgatatacaaattatggaattaaattagaacttctcctaatgtattttgtcttttggtttctcataatggcaacttctgttctgctcctattttggtgaataaaagaaataaccttcttccattgtgccagtgtcaaatgctgaagttacaattatctcttargcatgagatcaaatattcaataaaacttaataaaaatttcaattctgcttagaatatcaaagaaaaagttattaaggctaaaactcacaattaagtctttttcaatctcctcatatactttatccagagcttcgtcccggttggtggaggccacactggcagccataaactttttattccattctgtaaattctttttcttcartttccttgtagcaaaggcatagggttctaagagtttcatttgcaaagatctgttttatttaaaaaaataaatccaccaatgcaaagaatagttaatttatgtaattcaggatcaagtctgaaattttactttgaagtaatatactaacagaatttaaaaagagatcattaaacatgacagattctgtacaaatacactttagagaggggattaaatgtcacttttttttttttgagacaaggtctggctttatcatccaggctgggatgcagtgatgcaatcccggctcactgcaacctctgccttccaggctgaagccatcctctcacctcagcctcccaagtagctgggactacaggtgtgcaccaccacgcctggtaatttttgtacttttttttgtagagatggggtttcatcatgctggtcttgaactcacgagctcatgtgatctgcccaactcagcctcccagcgtgctgggattacaggcatgagccactgcacccagcctaaacatcactttataatagactttgcttttctaaacttctatagggtccaggactgcacttccagtttccaaagggaaaagcttacctttcttctaaatcttctattacctttctcattttctcattttctctttttctcttcatgactaggaaaatatcagaccaagggagctgccttggggtgtaatgacataagcacgaacctgacaactttataacttgttccaacaaactgtgatacaagtccaatcacctatgractctccactragcattattccctcaaaccaattctaaaatacacaagccattgttaaagctgaggtcaaagcttttaatggraaagagtatctggcaattttcccatgatgaacgattcaaacattttctttttttttctttttctttttcttttttttttttttgagatgaagtctcactctatcgcccaggcttgagtgcagtggtgcgatctcggttcactgcaacctctgcctccctggttcacgccattctcctgcctcagcctcctgagtagctgggattacaggcgggtgccactgcayctggctaatctttgtatttttggtagagacggggtttcaccatgttggccaggatggtctcgatctgttaacctcgtgatctgccacctcaccctcccaaagtactgggattacaggcgtgagctactgcacccagcctgatttaaacattttaaacagtttcaacatgaaccagtaaacatctcattactttatagtcacatcttttttattttgaccaagttttgctcttgtcgcccaggctggagtgcaatggtacgatctcggctcactctaccccctccctctggggttcaagcgattctcctgcctcagcttcccaagtagctgggattacaggtgcccaccaccacacccagttaatttttttgtatttttagtggagacggggtttcaccacgttggccaggctggtcttgaactcctgacctcaggtgatacacccgcctkggcctcccaaagtgctgggaytacaggcatgagacaccaaatactcaatcagttgaaccgcttctgccatcttggctagacaagatgtgacctatagtcagctctgtcatcctgtcacatatgaatgctttccttcctttgcactacaacttgaagttagtggaggtcttggggaccacacacatagtaagactacaacctagtatggttatgtagcttgctcaaggccaytggaagagagctaagccattcccctgcctcagtcctatagaccttgaagacccacatgctgggagagggcaccatggtgatatcccaggaagtcagtggcaggggcagaactgggacccaggtggctgtattcctactttactgctctttccaccccaactattgcaaagcaaagggagggtcagcagttaacatacagctttcatgcaaacttaacagacagcatcagagartaagttcagaatcccttgcagaaagaataaaagtgaaacttacatccagggcatcctgtgtttcttgcttagtaggattcattcgatgtaaccgttcataaataacagtgtcagcacctttacagtaaagcttgatattgccttctggggttcttactggtagtaaaagaaggaaataaacacaacaaagtttgattttttatatatatattttttgagacagggtcttgctctgttgtccaggctggagtgcagcagttcagtatcggctcactgtagcctcgaccccccaggctcaagcaatcctcccatctcagcctcccgagtagctgggactacaggtgcatgccaccatgcctggctaatttttatttttatagacattggaggtctcactatgttacccaggctggtcttgaactcctgggctcaagcaatcctcctgcctcagcctcccaaaatgctgggattacagatgtgagttaccacacccagctaagtttgattttttaatagaaaactacatttataaagttaatttgaaatgttactatctcataattcactrttagcttaaaaccatcagttcctctagaaaagtgttgccttcaacaaaactggtaagtcattatctacattgaatgtaatagtgaaataaatataaaaagattccttcacagtcagctctgttttttataacctcagttattcttccaacaaatatttactgactccctaccatgtgctatgccatgttctagttactttcttttgtagactttttctccatccaaccaacaggtagtttctcacctatgaactcacaacacttactgcttttaatacttcgaccacaacaccactcctaatgaccattttttttgggttttttgattaatgcaataattgtaatacatccctcactgttaaccagattttaaatcaaggtagatggcaagcatgataatcagtctagatctgtgtaagggacasagaaagcgttcagtaagtgtgcctaaggagggtgtaatagttaaacctgtatatttttattggttaaaaattcaatcatagtggagaaggcttgtagataccaccttaaccaagtgatcaaagttaacatccccattaatgagacaaaccaataatatatamcttctggctaggcagggtggctcacgcctgtaatcccagcactctgggaggccaaggcgggccagtcacctgaggtcggcagttggagaccagcctgaccaacatggagaaaccttgtttctactaaaaatacaaaattaaccaggcatggtggcacatgcctgtaatcccagctactcagaaggctgaggcaggagaatcacttgaaccagggaggtagaggttgcagtgagccgagatagcaccattgcacttcagcctgggcagcaagagtgaaactctgtctcaaaaaaaaaaaaaaaaagatatatatatatatatatatatatatatatatatatatatataaaacatgtatatacacatatatacatgtatctacatatatacacacatatataaatatatgtatatatataaatataaatatataaatatatgtatatatataaatataaatatataaatatatgtatatatatataaatataaatgtgtgtgtgtgtatacaccttctgatgtgatacttaaagaaaagcacagcatcacttacggactcttcctgccaacaatgtgtaacctagctctaatcatgagggaacatcagacaaacgcaaatggagggatagcctataaaataaccagcctgtgctttttaaaaatatcaatggatgaaagatcaaaaagagattgaaccgtccttgactcagagtcatgatcacctaatataacctgtgatcttagattggatcctggaccagaaaaacaaagaatgaacctccctggtaaaatctgataaagtctattgattagataatattgtactgtgttaaattttctggttctgaacattgcactgtatatataagtgagtgyttctgttcttaggaaatacctactatggtatatagtacagtatttaggggaaagggacattaggcctgcaatttattctcttttttatatttttattttctttttttatcatgtaatcttgctccttctaaygcaatttactctcaaatggttcagaaaacaataacctgtatgtatgtgtgtgtacatatatatgtgtgtatatatataggtatatataatgraattacatatatataattagatatatattagatctatatatagagatatgtaaatgaaatttcattatgttaacaattggtggatatggaagagtatgagggctctttaaaccattcttgtaacttttctataagtttgagattatttcaaattacgaatttaaagcagttcagtggtaggaagtgattttcatcttcacttggtggtctgttatgtgcctgcattgcagatatgattttgattcataagcatagctttgcttttctcagaaatcttttcctgstgagtcctcccttccctgccatcaagtacagaagagagcactcagaggtgctcaaaaaataaaagagcatgtgttgtttaaaataaaagactgctacaaatgtctacctgctgcttcagaaatgttccacctgctgccccagattcagcatctggcagcccacgtggttaaagaatgtcagcagctgtaatcccagctactcaggaggctgaggcaggagactcgcttgaacctgggaggcggaggttgcagtgacctgagatcgcaccactgcactcctgggtgacggagcaagactccatctcaaaaaaaaaaaaaaaaaaaagaaaagaaaagaaaaaaaagagagggattaaaaaagaacgtcagcagcatttgcaagattcagagatactgtggctacccctttgagtagggaacacagtgaagaatgaagaaaacaataccagtttctttttttttttttttttttgagacggagtcttgctctatcgcccaggctggaatgcagtggcgcgatgtcggctcactgcaagctctgcctcccgggttcacgccattctcctgtctcagcctcccgagtggctgggactacaggtgccagccaccacgcccggctaattttttttgtatttttagtagagacggggtttcaccgtgttagccaggatggtctcgatctcctgacctcgtgatccacccgcctcggcctcccaaagtgctgggattacaggcgtgagccaccacgcccagccaacaataccagtttcagtaaagctgcagaaatctcccaggagccaagtagctctttcactggctgctttatcctgatgccactcaatacaatgggcacaagcaacatctaaatgagcgattcatagacagactctgagggggacttaccaatgatagacattcgcttccggtcactgttgaagtccaaaatggcaagaacattgtaagtcctttcagtgcccagttcaytgatggtgayggtgttctgggtcctggcgaggaaggcaaagccaaagttcctggcagcgtttaccagggcaccttcatcgggagaggctgcctggtagttgagctgacctaacaaggaagcgagagaaatcccagaaaagctgtaaaaacaaatgcagagctcattgttgaggcctctgctgaggctcctgtgggggtcagatgggctgcaaagcccaaaacatccccaggaaaacgagtcattgacttggaagggttatgccaagattaaaacttctttgttttatcttgacttataaacagtaatataaactaaaaaagaaacattggtggagaatgagggaaaattcccataatcccacyatccacaggagaaacaacaggtgttgacattttatcattccctccagtgccttttaaaatgtctgtatctgaaattgtttctatcaagctgaatatacatttacatcctgattattttaatgctgtatctgagcatattgccatccctttttaaattctttataaacatttgaacaaatgtaaatatgttatcattttcccattacagacacttaatttccaaatttttttactctcaaaaagtcacactttaataacccttttgtatgtgtgtaaagatttttctgtttcttttttctttttagagacagaggtctccctatgttgtccaggctgctcttgatctccggggcccaagtgatccttctgcctcagcctaatgagtcgctagggctacaggctcatgtcacctcacctggcttattctctttctttcttgtttttctgaaacagggtctcaccgtgttgcccaggttgcagtgcagtggcacgatcatggctcactgaagcctcaatctccccaggctcagtgatcctcctacctcatcttcccatgtagctgggattactggtacacrccaccacacctggctaattttttgtattttttgtagagacggggtttcaccatgttgctcaggctggtctcaaactcctggactcaagtgattcgcctgcctcagtccctaaagtgttcggattacaggcatgagccactgcccctgggcccctggcttattttctaagagcagattcctattaggaaaatactgagccagagaacactgataattttaaaactcattggtatacaatactaatttgttttccaagaaggttgtaccagtttatcttccctctaaaaaagtatgttttctttctttctttcttttttgtttttttgagacagtcttactctggcaccaaggctggagtgcagtggcaccatctcagctcactgcagccttgatcgcttcaggcgcaagtgatcctcccacctcagcttcctgagtagctgggactataggcgcacatcaccacgcccagctaatgtttgtattttttgtagagacaggatctcaccatgttgcccaggctattttttctttaccatagctatattctccttattaaaaaaaaaaagaaaaaaaaaccacacaggctgggtgcagtggctymcgcctgtaatcccagcaatttgggaggctgaggcaggtagatcatgaggtcaggagatggagaccatcctggctaacacagtgaaactctgtctctactaaaaacacagaaaattagccaggcatggtggcacgtgcctatagttccagctactcgggaggctgaggcaggagaatcacttgaacccagaaggtggaggttgcagtgagccgagatctcgccactgcactccaccctggtgacagaccgagactccatttcaaaaaaaaaaaaaaaaaaaaagaaagaaagaaaagttgaaacaaaccaaccaaccttagtttgatcactatccgatatcttaatgtttaaaagttaaataatggaaaattgtcttctattcacaactacatttcaacaataagaataagctaggttcagtggcacgtgcctataattgcaactattcaggaggctgaggcaggaggatcacttgagcccaggagtgtgaggttacagtgagctttgatattccactgcactccagcctggctgacagagcaagatgcagtctcttttaggaaaaaagaaaaaaccaataagaagaggaataaatctcacagccagayacacaaaagagtacatatgctacatgattccactgaaataagccaaaaaactgacagagctaacctgtgttattcgtagtcaggaaagtacttttcttgtaatcactggaaaggaatgtaaagggaattctagggggattgataatgttcttttttaaaaatctgggtgctcattacaagagtattggtttgtgaaaattcattgagttatatacttatgatacgtacatatctctgtatacacatgttgtacttcaataaaaagtttaaaaaatactctscctacccaagatcttctatttttctactctagttattttgtctcaaaatagaaggaaaagcatttccgtggccagatgactttggacagaaagarcatttagttttccaaaatactttgaccaggatgaaggccacagatgcatgagcagctgtttatccgccagcctcacttggaatggttggtgctctggggtaacggtggcagagagagctaaacacaccttccttccttcacaattggctcagaggattcactttttaagtcaatattaatcacttcctaattaataattaaagatgacacttagggtctctctgtatttgttcactcagaaagtcattcactagaagctataaacgcacttcctaaatccggccatctagcaatcatatacaaatgctagagggcaaactatttaaccagagacaaatsagcagcggtgagaacaaagcctttcccttcggcaacttaagttggcacagcgatatatggcataatattgacagcaaacgcrtttccagcagagaaaaggaacaaaataataaaaagtggtaaagttcccacaagtaagacactcatatctagagcaaacaccttgatatttttatcattaaagaaaaaaaaatgttttccattaccttctgataatggaatcacagaattgcagactaacagagatgggaagaacgtcagtgacttggtccaaattccaaccttatgactgctggaagacacttggactaaaaaactatgcagccataaaaaggaacaaaatcatgtcctttgtcacaatagagattaggccattatcctaagcaaattaactcaggaacagaagaccacatacctaccacatgttctcacttaacattgggtactcatggacataaagactgcaaaaatagatagtggggacttcaagagaaaggagggagggagggcaacaagtgttgaaaaacttactattagggcagggcacggtggctcacacctgtaatcccagcactttgggaggctgaggcgggtggatcacaaggtcaggagtttgagaccggcctggccaacatagtgaaaccccgtctctactaaaaatrtaaaaaattagccacgtgtggtggtatgcacctgtaatcccagctacttgggaggctgaggcaggagaatcgcataaacccgggaggcagaggttgcagtgaaccgagatcacaccattgcactccagcccaggcgatagttcgagattctatctcaaaaaaaaaaaaagaagagaaaagaaaagagtgtggtgttgatggtatagtggtgagcatagctgccttccaagcaattgacccgacttcrattcccagccaacgcagcaggctgacctttcgtcctggctaacatggtgaaaccccgtctctactaaaaatacaaaaaaaattagccaggcatggtggcgggtgcctgtagtcccagctacttgggaggctgaggcaggagaatgcatgaacccgggaggcagagcttgcagtgagccgagatcgcgccactgctctccagcctgggcaacagagcaagactctgtctcaaaaaaaaaaaagaataaaaaagaaaagaaaaactaactattaagttctgtgttcactacctggatgatgggatcaattgtaccccaaacttcaggatcatgcaatatacccatgtaacaaacatgcacatgtatcccctgaacctaaaataaaaattgaaggtgtaaaaacaaactaaaaaaacaaacaaaaacaaagcaaccttcctaagaaaactctttatttatggcacatttagaggcaaccagaaagwccttctttttctttcacacactaatttgtggctcatgaaattgatgtaatcaaagaaagatgctcaaaccacaaatcccacctctcagttctcatcaacctgattccctagcttcagggtaatggtggcagagaaagctaaatgcacctttcttctctccttcacaactgcctcagctgattcactctaatttctttttgagatggagtctcactttgtcgcccaggctggagcgcagtggcaaaatctcggctcacagcaacctccgcctcgcgggttcaagcaattctcctgtctcagcctcccaagtagctgggactacaggtgcccgccaccacgcccagctaatttttgtatgtttagtagaggtggggtttcacaatattggtcaggctggtcttgaactcctgacctcaggtgatccgcctacctcagactcccaaagtgctgggattacaggcgtgaatcactgcacccggctcactctaattaagtgacaataaactacctggccaggcatggtggctcacacctgtaatcccagtgctttgggaggctgaggcgggtggatcacctgaggttaggagttcaagacaagcctggccaacatggcaaaactccatctctactaaaaatacaaaaagttagccagggtttggtgtgggcgcctgtaatcccagctactcgggaggctgaggcaggagaatcacctgaacctgggaggcagaggttgcagtgagccaagattgcggcactgtactccaacctgggcaacaggagcgagactcagtctcaaaaaaaaaaaaaaaaaaaaaaaaaaaaaaaaaaaaaaaaaaaaaaaaagactgggtgtggtggctcacacctgtaatcccagcacctttgggaggtcaaggctggaggattacttgaggtcgggagtttaagaccagcctgaccaacatggagaaacgccatctctattaaaaatgcaaaattagctgggtgtggtggggcatgcctgtaatcccagctactcggaggctgaggcaggagaattgattaaacccgggagacggaggttgcagtgagccgagatcatgccattgcactccagcctgggcaataagagtgaaacttggtctcaaaaacaaaacaaaacaaaacaaaacaaaacaaaaaaaaaaccacacacgctcacaaaaacaagccctagctctcagatgtctttttctcctcaatcctccaagtgtctcccacatccatggctttgttatccttcccaaagaccccatactaatgcaaaccttcagcctctgtgccaatctccagtgcctacctgctccagactctcacacccgtgatgcgcaaaactcctgaaacaagctctctgatcattaactcagaacctccaggtgaagtgaaggcttccaagccttccacattctgctctcacatgacctctgtgcaggcrggagtctgcaatggcctcaaggttcccatcccagtgctgtacattcactttctcccatttactcaatcaagcactaatctaggtactgctgtgaagggaatttgcagatgtgcgatcctaatcagctgaccttaaaatagattatccaggtgttcctgactgaattagatgagcttaggacagaactcttcttggggagagacttggagcagcatgaaaaaggttcaatttaagggagattctccaccgctggctttgaaggtgaagtggaccagctggcagggaatgaggacagtctctaggagtggaggrcaacccagttgataaagaataaagaaatggggacttcagttctacaaccacagagaactgaatcctgctgcaaccacacgtgaacgtggaaaaagacactgagctccagatgagaacatggcccaaacttgattttagtcagatgctgagcggtgaacccagtcatgccatgctcagaattctgccctacagaaccgtaagctaatgaacaggtgttttcagtagctgagttacactaattcactacagagtagcagaaaacaaatgcatgtggcagggtgtggtggctcacgcgtgtaatcccagcactttgggaggttgaggtgggcagatcacctgaaatcaggagttggagaccagcctggccaacatggtgaagccccatctctactaaaaatacaaaaattagctgggcgtggtggtgggcccctgtagtcccagctactcaggaggctgaggcacgagaattgcttgaacctgggaggtggaggttgcagtgagccgagatcatgccattgcactccagcctgggtgacaagagcaagactgtctcaaaaacamaaaacaaaacttgaaggtgtagtccccaaggtccctttcaagggatcctttcctggtactttatggttaaaagccgaaagcaatttcttctctaagctcctgcactagaagccaacatgtctctattcgtacaacccttgacctcagctgacagtggacaaagagctgcggtatgtcaggctggagggactttgtgttatttttttttttttgagatggagtcttgcactgttgcccaggctgtagtgcagtggcgtgatcttggctcactgcaacctctgcctgccaggttcaagcgattctcctgtctcagcctcccaagtagctgggattataggcacatgccaccatgcttggctaatgttttgtatttttagtagagatggggtttcaccatgttggccaggctggttttgaactcctgacctcatgatctgcccgcctcggcctcccaaagtgctgggattacaggtrtaagccaccgcgcccagccctgctggaaggaactttgtacatccaaccttcttactacaacaccgaggaaggtggttctcagagagggacccagactgggctgactcatctctagcatgtagtccagggctcttcccataatatcccactggggaaagatagaatagggaccacaggatgaatttacatttgcctaagttggccagttagcccttaaaatcctatcacgtacccagagaagagtacaataattgtgcttatgagtcaaaaccaaagagaaccaggtgactttgtaatatcatactttatgcttattgcctgggtaaaattggcttggtgagtcaaatagacttagacctctgcttccatgattcaggacctggtatcgcccctttctrtccttccccacatcatctgctgataaacccttccatgtatccaccctaatctgaactctgttaccttgcttcattgcaatattagattcatccttggaaaatgggtttctttgaaacttgctgaaaggtatcatgtacagcttctatacatttaggtgttttttgtttttttttgagatagggtctcactccatcaccgaagctggagggtaatggtgagactatggctcactgcagccttgacctcctgggctcaagcgatccccacctgagtagctgggactacaggcatgtcccatcacacctggctaattttttgtattttttggtgagatggagttttgccatgttgctcaggctggtcttgaactcttgagctcaagcaatccattcacctcgaccttccaaatgctgggattacaggtgtgagccaccaagcgttggcctacacatttagtttttatgcatattccttctctggaaatttcatacctgctacatatgaaacattaaggttgagaaaagagagggacttatgtatgcckcactgactgaagtaaaaagtggaagatgtagtgaagtggatgaagtgagggaatgaagtgaaggcagactacgctttattacagaaacaccaaaagaactccttttgctctttctataaagtgcatgtgtgtctatataatttatcattatgwccatttgtgataaaatgactagctttccttgatacaggacaaacttgctgtgacaaagctggcacaaactgcatcraaggattctgcaaaggaacctacaagccattctggcttgttcccatgaaattcacattaattatgctcctttaaatggaaaaaggcaccttaaagagatccaggctgaggctcatattatttcaaacccaaactataacagaatctagtaaataagagcatatatctgaaattatttggtagaaaagattagtcaagttcaaagtccatttctgatacagataaagcttgacttttcactctcagtcaatgctcagtaataaatgtgctaagaaaagttagtttcttctatcatagttcaagtaccaatcatttctttcaacaagatttcatttgcaaagtgaaaaaaatacacctggagctatagctatgaataagtgtaaattttcagggacaagaagcttgtttcctactttgctcttccataaaccatctagtggtaagtgctgagaaatattcactgcattctaatatgagacagatttgtgtactacttgacatgcatttgagccataagcaggagttacctggaaacaaaaaacctggtctctaatgcctgagatgccagagaaacactcaccatcagtcctatccaccatgactgtgtggcaaactgcgagcaagaagaagaactgtcgtacttctggctctttccctgactggatttgctcaataagatagtggtcataaaatgcaagcttcccatcagcatatgtattccagctaaaatcaacttgctgaaagaaatggagaaaaacaaaatatgattttataaaatatttttgacttaacaaatgacatgaacttttcttcaaaggcaaggtttcaattatgcaaaaaccaccttaggattttagcacattcttaaatgtcaagaggctcacaactgtcttaaataaaaagctcccccccyttttttttttggaaacatatatgaccatatatgggtctcactctgtcacccgggctggagtgcagtggcttgatctcagttctctgcaacctccacctcctgggctcaagcaatccttctgagtagatgggcctacgggcatgcaccaccatacctggctaatttttgtatttttttgtagagatggggtttctctggtctcaaactccttgactcaattgatctgccaaacttagcctcccaaagtgctgggattacaggcatgagccaccatgcctagtcaaaaggtactttgtggtggactaaactatgttcccccaaaagatatgttgaaattctaacctctggtacctatgaatgtgaccttatttagaaacagggtctttacagatgtaatcaagataaaatgaggtcatactcaattagggtaggtcctaatccaatgattggtatccttattagaaggggaaatgtggacagagacacacagacacacgggggacaccacgtgacaacaaaggcagagacacagagttgtgtttccaagtctccaagccaaggaacaccaaggactgtgggcaaccaccaggagcagggaagaggcaacgaaagagtcttccctagaccttcaaaggaagcatggccctgctgggaccctgacatccccagcatcccaaacgattcttcggcttaaaggtcttacctctattttgttgtggttgtgttgagaggcatcccgatggtcccctgagaaacaaacaggacaaaacaaattgattctacacctaygtccagaggcccctccttacctggctttgcttatatagtgatggtgrtaagaccatatacggcctggacaggctaaaatatttatctggcactttacagaaaacgttagatgacccctggtctagatattcaaataccagtggctgtccctctccactaccttctcctaggggcctgaatcatatcctttgaaatgctttacctctcccaagtcagaaggactcacatatgtgagccacgtcctcagcccctcagtgccctaccatcttcactgatacttcttatgagaaaaggcactcacggtgcctacaagtaggaagtatatatgcatgtccctatatcattttaaacaattgtgctattaagtatatttaaaatagcactctatttgaatctagtattagccttaatattatctctaaatttacataaaattaaatttctaaatgtttcagaaaattagaactgaaatcaacttttaaaacaattggctgggtgtggtggctcacacctgtaatcccagcactttgggaggctgagatgggctgatcacctgaggtcaggagttcaagaccagcttggctagcatggtgaaactccatctctattaaaaatacaaaattagctgggaatggtggttcatacctgtagtcccagctactcgggaggctgaggcagaagaatcacttgaacccggaaggtggaggtttcagtgagccaagatcgtgccactgcactccagcctgggcgacagagtgagactctgtctcaaaaaaacaaaaacaaaaccaaaaacacaattgtaggccgggtgtggtggctcacgcctgtaaccccagcactttgggaggctgaggcagatggatcacttgaggtcaggggttcgataccagtctggtcaacatggtgaaaccccatctctacaaaaaagcaacaacaacaacaacaamaattagccaggcatggtggtgtgtgcctgtaatcccagctacccaggaagctgagggaggagaatcatgtgaacctgggaggcggaggggttgcagtgagctgagatcgcaccactgcactccagcctggtgacagagtgagacactgtctcaaaaacaaaaacaacaaagaaaacaaacaattgtagtgaaatacacataataaaatttaccatattaaccgattttttgtttgatttttttgagtcagggtttcactctgtcacccaggctggagtgcagtggtgcaaacccagcccacaacagcctcgacgtacccaggctcaggtgatcctacctcagcctctcaagtaactggaactacaggcacacrcaattttgctcactgcaacctccacctcccgggttcaagcgattctcctgcctcagcctcctgaatagctgggactagaggcatccaccaccacgcccaggtaatttttgtacttttagtagagatggggtttcatcatattggccaggctggtctcgaactcctgagcttgtgatccacccacgtaggcctcccagagtgctgggattacaggcatgagccactgtgcccggccagagatggggttttgtcatgttgcccaggctggtctcaaagtcctgggctcaagggatgtgcctgactcagcctcccaaggtgctgggattgcaggcgtgagccactgcacaccagtcaaccaatttttgttgttgctattttgagacagggtcttgctctgttagccatgctggagtgctgtggtgtgatcttggctcactgtagccttcaactcccaggcttaagggatcttcctgcctcagtctcccaagtagctggaactataggcatgcagcaccatactctgctaatttttaaaaatttttgctttgttacccaagctggtctagaattctgggcctcaagcaatcctcccaccttgacctcccaaagtgttgttattataggcatgagacactgcacccagcccattttaaccacttttaagcatacagttcagtggcatcaagtatattcacactgttgtgcagctgtttcatcttgcaaaattgaaactctgtacccattaaacagtaactcccaattcccctgactccagcccctggtaaccatcattctgctttgtctctataaatctgattattctaagtacttcatataagtagaattatacaacatttgtccttttgtgactggcttacttcacttagcataatgtccttaacccatttatgcctagtgttccattattggaacgctaagcatgtgggagttatttatatcctactgctcaaggtcatcaccaagttctgattgcaaaaattcaaaaaattgcaacctctggcataaacgagttcaggttcatctgtgttgtagcatgtgtcaaattttccttcctttcttagactgaataatatttcattgtgcgtatccacattttatttatccattcatccattgatgaacgcttgggttgcttctatcttttggctattgtgaataatgctgctatgaacataggtgtacaaatatctctttgagcccctgtttcagttcttttgagtatataacctgaagtggaattgctagatcatatagtaatgagacttctaattttttttttttttttttttttttttagacagagtcttgctctctcaccaggctggagtgcagtggtgtgatctcagctcactgcaacctctgcctcccgggttcaagcaattctcctgcctcagtctcccgagtagctgggattatagctgtgcgccaccaccacacctggttaatttttgtattattagtagagacggggttttgccatgttggcaaggctggtctcaaatccctgacctcttgggatctgcccacttcaccctcccaaagtgctgggattacaggcctgagccaccacgcctggctgtgagcccacttctggccactgtcctctcccacgcatgtgtccccagtgctgtccatggtgctcctctggtgcttagctggagaatggccctagcagcaggactctgcatcgagagggcaccagcaatgccaggagacaggctatagtccaagtaatgacctgcacacggcaggcagccccactcacccagaaaatgagtgacggcttccacttaccatatatctgcccgttgatacagcactttttaaaggtcatgatattttgtgtgagtgtccccgtcttatcagagaagatataatggatctgcccgagctgttcattgagtgtggtggttctagcttttgcgggtgtgtccttckcagcatagtacatttgcaggtcccagttgatgaagtgactctgtccaagacgaatcacttccacgctaggaagacagaagattattttccgtagagagctcggatacgagtggcaagtagtagagattttattctcattgtacagacragagcaagctgcttatttactgctatggtctgaatgttagaatccccctccaaattcatatgttgaaacccaatccccaattcaacagtattgaggtggggcctttagaaggtcattaggtcatgagggctccacccttatgaatgggattagtgcccttattaaagtggctcaaaggagcttgcttgccccttctgccatgcgaggacatagctagaaggcaccggctgtgcctataaagcagaaagtgagcctttgccagaccctgaatctgccgatgctttgatttgagacttcccagcctccagaactctgagcaataaatttcgaaggtcttttgttatatcagcccaaactaagccctctacaaggagacaagcccatgcactcagcctctggtttctcctaaccacatgcatcattctcaggcttcagggtcaagctgattttagacaagtaatttccactcaaaattgctcagtgagatttcccactcactcctgggcacatttagccaaggcacccatgttcagaatacacagcccagcagaatggaagacacagcaacactgcagacagagcagtggacacagcaagcttgactcttcccccattccccatagcacccaggggcactggaatggccatgttcacctttgccctaagtggtagggcagagggagtgagagtaccctagggtacagactccactgtgctctcaaacagggcaaaaggcttttggcaaataccccaaatcatgatccctaaattatgataaggttatagaatatccaaaataagatattataaaaggatcatctgaattttaaaactataagggacattacctatctcagttataaggaagctgtttacatagccagcaattgttaggtgggccaaggaagtccttaacaagttaaacagatggaaaaatgatgctctccccacttctctcccttccgtaagtatttcctaagtgcctactatgtaccagataccattctaggtgcaggggacatgtctgtaaacaaaacaaagtcctttctcttaaggaggttactttctagtagagacagacaaataaattaataaagagaggctctatcagaggtgaaagttctctgcagaaaatcaaagcagggggccaggtgtggtggctcacgcctgtaattccaacactttgggaggccgaggtgggcggatcatgaggtcaggagttcaagaccagcctgaccaacatggtgaaaccccgtctctactaaaaatacaaaaattagccaggcatagtggcatgtacttgtaattccagccactaaggaggctgaggcaggggactcacttgaacccagcaggtggaggttgcagtgagctgagatcgcgckactgcactccagcctgggaaacagagcaagactctgtctcaaaacaaaacaaacaaacaacaaacaaacaaacaaaaatcaaagcaaagcaaggtaaggagatatgaagatctccaggaaggagaagtggtcagaaacagaatgagtcaggaaaggtcagggtaataaggtgttgtctgagtaraggcctttgtagtgaaaggggagcagatagatacctaygtaaggaatgcccctggcagagaaargagcagggacaaaggccctgtgcaggaagaatatcaaggggccagagtggcagaagcccagggaggtgggctgaggtgcagaaggtacgggcggagtggaaggctgagcaccagatcacacttggggccctggggttgggtttattctgaatgaggtttgaagtcaaagcagagatactatctggaagaacttgctccagcatgttttcaaaggacctttatctccaagaaaaaagaaatcgtatttgtcacatgacatacctttatataaaattatgtatacagtttcttttataatacacattgatggttttaggcaaaattatctatgtaatagttcccttgacaaaggtaacactcaactcggtttttctcaaagtagctgtggaacagatggctgccccagggctttccttcatgttaaaagaacaacagtaactacatgtaatcaaattaaaaataaagcaaatgcacatataatgacactaaaataaaataaatgcctctaattataggtgtgtatgtgattcctatgtctctgggctattctttatcagaactaagaatgaactctggctgctgggtttattccaaagcactatccctcccaaaaaggtctcaaagtcagtttggccaagggcagtgaactttcatattaaaaagagaaaaaggccgggtgtggtggctcatgcctgtaatcccagcactttgggaggtgaggtgggcagatcacctgaggtcaggagttgaagaccagcctggccaacttggtgaaacctgtctctactaaaaatacaaaaaagtagccagacatggtgatgggcacccgtgatcccagctactcaggaggctgaggcaggagaactgcttggatccaggaggcagaggttgcagtgagcctagatcatgccattgcattcctgcctgggcaacaagagtgaaactccatctcaaaaaaaaaaaaaaaaaaagtaaaagtaaaaaatgaagaagtatcaccaaatcagctgcttaccacttatcggagatatgcccctgactttgttgttgtggttgagatttgagatgaaaaagagaacattttgagaggttgatgaaggacagggagtttctttcctactaggaggtagtggccggaaagcacaagttctccaccttgggtgtggcagatgataataaaggctcagataagaggtgaggaccacttccaaaagggaaaactaagtttttccatcacctgctaaatcttcccctcctcccagtccctttctgaagtctgggctttggaacccggtgagaagggaaccttactaataagacaatgactacaggagtagcaatcgatctttgaaattccctacccttatctgcaaacaggatgagataaaaggtgcctggcacagagtggatactcaaatgttaatttccttttcctctcttaccctcaattctgaaatgaacrtgattttcttacctgttctttgtgacctttgaaacagtgatcactagaaatgaaggcactatgttgggagaaggtacaacattcttccattaaagcaaaatgccagagaggacagccttacctgacatagagagagatgggtaccatggtgttgagaacaatgatatagccccagaaaatgaggaatccayggtaggagggtgtatcgtcttctccatcatagaggtaccaagaggaattgcccacctgtgcttcccaataagcatggccgatggcaagaccagcagaaagcagaataagaacaacaaagatctagaagacagaaaacatttaaatgcattctgaagatggatttccaacctcttgcatttcctagatgctaattaaccttactcartacttcatatgattgagaatttagtagtctgaaaaataatatatgtcaaataaaaacagyactatcataacgctttgaaagtctatttgattgctgcrattgactgatgtatcctacatctcccatagaaggtaaggttttgttcccaaaattatctctccaaagagaaggtggtgtcttatattcaaatccttgaagaatcttatattacagggcattctctcaattacgtttactttgaacaataacatactgtttggggaagatatcttacttagcatgaaacaacttccaacaaggctgaactggaaaactggaatgcttatagaagatattcaacagattttttttttttttttttttttttttttagacagcgtctcactgtatcacccaggctrgagtgcagtggtgccattgtggctcactacaacctccacctccctggttcaaacaattcttatgcttcagcctcctgagtagctgggattacaggcacgcgccaccaaggccggctaatttttgtctttttagtagagacgagtttcaccatgttggccaggctggtctcgaactcttgtcctcaagtgatctgcatgcctcagtctcccaaactgctgggattacaggtggccctcrcccagccagaattwttttttcagggcaagaaaatttcacctatatttgggcgattattccttaaggtgtaatgtcataagtattgcatgacattgtaaaataagatcacttaagaagcaatatgataagtattatgtygtagaagttatgagcatatatttatggaaggaataaaaagtcaaccatcctagtgrtacttggagattcgcaagtgggaataaaatttccagagacaaatttaaatttctggacatggagtccaaaagtgctatatctcacaactttgtcgtggaaagagcagagtgccaaacaggctctttgagagtggataaccacaaccatgacaccaaagatgaatgtgaaaagttcaaatacaattttcatgaaatgagaaagcaggggaaaatgtttcttaaattattatttttatgtgattttaaacatgtatatgcaatcaaagaataagtwttagaagtatgcattcaaattgaaytaaatacttgaaaaaatttttcattgggaaatagaaggagtgcttaatatttggggtcaccacgtgggcagaaaagrgcaaacatagcaggtctgagactgcttcctccgaaggccggcttgcaaggttcgccctgggctggtatctggtaacttagatgtttggaggatttcccagttattttttattctctgataagaatagctcatgggccgggtgcagtggctcatgcttgtaatccaagcactttgggaggccgaggcaggcagatcacttgaggtcaggggttcgagaccagcctggccaacatggtgaaaccccgtctctactaaaaatacaaaaattagccaggtgtggtggcaggtgcctgtaatcccagctacttgggaggctgaggcaggagaatcacttgaacctgggagacggagattgcagtgagccaagatcatgccattgtactccagcctgggcaacaagagtgaaactcaatctcaaaaaaaaacaaataataataataataaaaaaactcatgatgcctaactgtgcaaacagcatggtttatgctgaccatctgcattcttttggggagtctagagtttttttgttaaaaacctttgacactgagtctctcatgagcttccctggtatagacaacatttcacatgtggtgtcattaattgctgctgggagaattaagtgcctattgtgtgtgtggtttggtggggagtgggggcaggacggccgacttttggaagcttgtgcctggtttcctttgcactttgctccatgagtctttggtgatcttgctctgtgtccttttgttgtaatgactcacagctgtgaatacgactatgtgctgaggcctatgagtccttccagtgaatcatcaaacctgggagtggtcttgagtgtcctcgacatactttatttttagccttgccttgtatttggagctatacagtatatgttgggggtgctgggggaggcttgcttctaagagaactgcctctatgggaaagtaacagcaatgaaatcaaccctacattgacttcaggagtccagcttcactaatttatctagggcttcctggttttccagttcccgtcatcaaagcactcagggcaccctacaaccgaaatttcccttcccaagggaattctcctgttaaaagtgtggcatttctgagaaaaagtaaggcatttctggaaaaaaaaatcccttcttcctgcatttgaagcttggagtgcccaataatttttctattccacctaaagaggtaagattttgtattagaaaaacatacgataatattagtgcaaaagacagcaatytagatgagagatctactgagatgaaaaataaataccgtgtaaaccatgtagttcatcaagtaatcaattttagttcttttaaatctggttttcccactattcttcattattttagtgtcagcacctgaaaatggaaaattcaatgtagtcatcagttgggaaaaatcaattcactagctcaccaataaaattactcttcttggccaggcatggtggcttacgcctgtaatcccagcagttttggaggctgagttgggcggatcacctgaggtcaggggttcgaggccagcctggccaacatggcaaaaccctgtctctactaaaaatacaaaaattatctgggcatggtggcacatgcctataatcccaactactctggagcctgagacaggagaatcacttgaacccaggagacagaggttgcagtgagctgagattatgccactgcactccagcctgggctacagagtgagactctgtctcaaaaaaaaaaaaaaaaaaaaaaaaaagctcatgatgctattactcttcttttggttttgatggacaaaggacagaaaagcaatcccctctaagtctttaaagatcatagctgattaatttcccaagaaactctgaacgtacctgcaaaaatgactaagmcgtggcagaaatcggtgttcctaattacacagccacgtaacaaaattttatcagcatccraaggaaaacttgtgtttctccaaaatagtgttcctgtaaacttatctagtckgttattgggttcttcacattcaataaaaccttttaaaaatataagattcacataattaatcacatacaaaagtctttctggttttaatcaataggaattgaaccaagcaactaaaatttaaagcaaagtaagacatgtttggtacaaaccatcaaatgtagccaatgtatcttctctttggaggtactggtctgtgatttcaagtgacatcttaaattttaaattggtttctctaaaggaatggggaaaaaatgaattaaatgaacaaatttttgagttcaaartggaagttaatcatccaaagttacattagccatacctggacatgaagcctaaataattagctgtttctattttcaaactctgttcaccttggaacttcaggtttggaaaaggttatcccctgaagtcgagaaaatttctgaccttgggaaatgttggttcccttcactgtttgttgttgtgaaggttaggacagaggtacccacaaacatccttctcattaactttaactttaccatcagctaggactaccaaagtgctgtttgaaaatgtagtgtctaatatttaatcacattaaaatgattctataacacatatttgttacagaaattctgtttcgcctctgtcaaattcttttccagagtgaataactggatcacatgtttttgaaagacaattttatttggaaaaggaagtcttagctttactcccaactgccccaccatagtgcaaggtaaggtcgtgggtgggcacaagggcaggccggggcaggtgctctcaagggtgaggctgccgtctcacgactgamggctttatataggattcacgaatactcaggaattttccctagggaagttcattctcaacctcaccattctgttctggcagggcatgttaggatcttatgtctttgtaaagctttagaatctctcatggaaataatagcagttttatagttgagaataaacagtcgggcgccgcggctcacgcatgtaatggcagcactttgggaggcagaggcaggcagatcacttgaggtcaggagtttgagaccaacctgacaacagaaagctctatcaggcaactgcccataatccaatttgggtatagcctcggggccttaaagagaatgcagtgtctttgtcagttaagcctttacaattaagaagtggttaattggtttttaaccaattagcctgtacaattaagaagtggttaattggctttaagtatttttttccgccaaaaaaaaaaaaaaaagtgtgatagatttccaacagtcaattgcctgatctatgaagcaawgacagccctagttttcagtctcatgatttccgctctctgtaaagcagtgtatgcacatctggagcgtgaggcgcgaggagcagagggagcaatgtcccgactctaccacttactgtgtgaccttgggcgggctgctgcacctccctgggcctccgattcctcatgggtaatacagacgaataatattcgtctcacatggtcgtttagaggattaaatgagctaatatgtaaagtgccggcaacctcgtgagcactcaataaatgccttgaaaactggtcagaaaactggtcaaaaacagaacttcattctcttttaaatgatagcatagtaaccaaaaccaacacaaggagaattcaaaattgcctcctggggccagctgctgtggctcacccctgtaatcccagcaatttggcaggccaaggtgggcagatcacttgagatcaggagttcgagaccagcctggctaacatggtgaaaccccatctctactaaaaatgcaaaaattagctgggtgtgggggctggagcctgtaatctcagttactcaagaggctgaggcaggagaattgtttgaacccagggggtgtggaggttgcagtgagctgagatagcaccactacactccagcctgggcgacagagtgagactctgtctcaaaaataaataaataaattgcctattggtaaagacyttaaaaatctgttcctttctctgacacagataataacctcgatattattcatatctgtctggacgctgctcagcagttgataaagggctcagacacatatgctcctgtctgatccttttaccttccctgagaggtggagaaacgcaggtagtaagagctccacttcacagaggcgcaaaggtgagatcagtagggacagcagcaggtggcagaggcaaggccagatatcaagccgtctggtccacaatgccccgatttcagtggaatgaatgtgccttcaaaggccagctttaaatcagrcccatcgagacacacttacccrtccagttctgctgtttccacatagcagaggctgttaggctcagagctagacagcaggagaatgtcagcctgtccaaaacaaaacacacaaataacaccgagaccctgagggaaaagccgagcacaggggctgggggagaacaaggaacaagagaagcagaatttgttcacttactggaacaaaatcattttttttcagacgaatgacgtctccaacttgaatttctttccacttagcaactttgaacctaaggattaaaaataatgaggatttattgacattttaagttacaggcaagggaattactattctttctggatgttatagattctggaaaatatgcaagtcacagagaaaatgctaaaattttgctctttaatggatgtaaacatattaaaggggggcatgaaaatygtattgacctctgaaggaagcaatgatgaatgactttgatacattcttttcatctaggtcatgtaaggaagagtttatgggggccacttatgtgcrtggcagggaaatacttgccacccccttttgtttttgcttatgtccaacttgcctccctgctgtgttccttctcagtgacccatcacttgctccatgctggtcccaggacagaagcacctacattatggcacccacctgggcctcccagagtcttcgtggggcttcagagcttgcctactctctgctgtttaaattatctttattatttatttattaattttttttttcattgagacagagtcttgctctgttgcccaggctggagtgcagtggcacgatctcagctcactgcaacttctgcctcctggggttcaagagatcctcctgcctcagcctcccgagtagctgggactacaggcacgtgccttcacgcctgactaattttttagagatgagtttttaccatattggccaggctggtctcgaactcctgacctcaggtgatccacccacctcggcctcccaaagtgctgggattataggcatgagccacctcacctggccggttaacttcttaattgtaaaggcttaactgacaaagacactgtattccctttaaggccctgaggctacactcaaattggattatggtcagttgtctgatggagctttgtgttgtcaccacaacttgtgtttacacagccccttcagcctccctagggcatcattttcagggctttgctcacgtcttgacatctttccccacattccctcgctaaagtgaattttcccttccctgtactgtcagagcattttgtttttatcttttttattctgatatggattttattagaatgatgtgtgtaggtgtctcatcttctgtcttgaactataaatttctcaaggatactgtcctgcctccaacatgcagaaagtactccataagtgtttgttaaattaacgtagtcaactgtgacgaaagcaccaactcagggatcagtaatgagttgttttttgagcaggaggcttcaggcagaactgcaaattcaagtgctaaaaatagtaactaaggcctcattccaagactttttatgtgtcaacactgaggaaagtaacctgacttacagccgtacttccactctaatgcaaatatagactataccaagctataaatatgtttagatggctttttttcctttgcaaataagaaaattatgttccaaagttacctttcaagtgtcaaaagacaaaatcacaacaatttaaagatcttaattggctttatttacaattctaggattaggaaacacttcattcagtaaaatagaataagtgtcccaatgagcctagcagaggaggttgttgttgttaagacaggagtctcggccgggcccggtggctcacgcctgtaatcccagcactttgggaggccgaggtgagtggatcatgaggtcaggagattaagaccacggtgaaaccccatctctactaaaaatacaaaaaattagccaggtgcagtggcgggcgcctgtagtcccagctactcgggaagctgaggcaggatgctgtgaacccgggaggcggagcttgcagtgagcggagatcgcgccactgcactccagcctgggcgacagagcgagactccgtctcaaaaaaataaaaaaaaaagacaggagtctcactaagttttccaggctggcctcgaactcctggcctcaagtgatcctcctgcctcggcctcccaaagtgctgagattacaggcgtgagccaccgtgcctggccaacccatatgtttagcctgtaccatacctacctacactggtaaagaggagctctgggttgccttgaatttggaagtctagggtgcatgtctggcagggccatggcctgagcagcccctgcagtggggtcacacctataggaacttgagcattagcagggtagagcacagggggcctcctcagaggaaactggaacatcggatagaagaatctaacagaattgcctccaatatttcagtattcagaattgccttccagtagccctgctaagaaggtgctggcctatccatttgtcatttcggacttacatgcaaatttctattttaaaatttcagaaatactgaaatgtaaaacatctacaatttcgtyaattgaaagataagccaaattttttttttaatgctggagttaagaattgtatactaaattcattaggggaactggggcataaacatatatttaaaaagtattttaaatctccaagtcatttttggccataaatgaatggcagataaacacatagtgattagacgactgcctccagtgaaattaagtttattatttatagcaggttcattacgtccactgggtatatcatttgtatatgtgaaaatctttaaaacaatattatagtttaaaacttttaaaagtgttgatatgttaaaaattttaatgaatatttcctatggaatttagtactcaaaatagtcatctttttatctatttttatcactatccttattagatttattacaacaggggtacatactcattaaaaagataatttaaggccaggcatggtggcttacacctgtaatcccaacactttgggagatcaaggaggataacttgaggtcaggagtttgagaccagcctggccaacatggtgaaaccccatctctactaaaagtacaaaattagctgagcatggtggtgcacgcctgtaatcccatctactcggaggctgaggcaggaaaattgcttgaacctgggaggtggaagttgcagtgagccgagataacgctactgcactccagcctgggcgacagagcgagactctatctcgaaaaaaataaacagttaatgtactaatagccttctacattgtaataattatctctgaatgtgtttctaggcagagttatgcattacatccttgaaactcagttactaattagacacagtacctgccatccttaatgacttcacacgtcctattgttgatttccttatccattttatggcgagccttgagaaggaagatggggaaatgctgttttaaacatctcaatagagaaggaaggcacgagaacttaaagtcaactcaaagcaatgagtagaacgttgtatgagaaatcctcaccacatcgtccaccaggtctttgattgcagtgacgcccagcaccacaagcaggggcactagtgtggtgtaccaagccagggtagagatttgaggaactgcctaaaagaataaaagggcttatgtgtgtgtccatgaaggcrtatcaagcttacaggtaacttattgctaattctaagcttgctaattccaagtctcatcaccgtcatcacataagtctacatcctgcagagtatataggaaaggctcttcaagcatttggacaacctccttctagtggttctctctagcttctggatacctggaacagagcctagagggcagtggctcctgaaattatctcattgcaaacttaactggacaccaaggaagttttgtattatgatacctaaaaaagagttgctctaaatcttttgtgaaartcatatttaactgggggtgagggggtaggagtggcaagggagaagtctcgtcttaactttttttttctttttttttttttgagatrgagttttgttcttgtcgcccaggctggagtgcaatggcccaatctcggctcactgcaacctccgcctcccagattcaagcaattctcctgcctcagcctctgagtagctggaattacaggtgtgtgccaccatgcccggctaatttttgtacttttagtagagacagggtttcaccatgttggccaggctggtctcaaactcctgacctcaggtgatcctcctgccttggcctcccaaagtactgggattataggcgtgagccactgtgcctggccaaagtcatcttaacttttaaggaatgcatgcatagtaggttctatactgcaggtttctcagtcagtggtttctgaggatcccatgctgaaggcaatgatggcaagaggtactagctgcctctgaaagtgagggattagggagagcatctctgagggcattagaagaaagtgcttccttcatgatcatcactattggcctatccaagaaagtgagctggccttcctccatcaagacagcctctaagtttgaacaaagattgggatgcaagtttaataaagttatttcataaccatcctcctgatcactgggctgtataatgtagtggttaaaatgacaggctttggagtcaactcctagatccaagtcttggtcagctctatcatttatggcttatgggactttgagcaagttactttagcttactaggcctcagcttttctctgcaaaatggaggtcatgccaggcctgaccttctagactagaagaattaagtgtagtgacaacacaagttaagaagctgcctacggctattactgttaccctaatttggattgctgaccttaagagaagataactgcgccaggcacggtagctcatgcttgtaatcccaacactttgggaggccgaggtgggyggatcacctgaggttggaagttcgagaccagcctgaccaacatagagaaaygccrtctctactaaaaatacaaaattagccaggtgtggtggcgcatgcctgtaatcccagctactcaggaggctgaggcaggagaatagcttgaacctgggaggcagaggttttggtgagctgagatcacgccattgcactccagccttgataacaggagcgaaactccatctcaaaaaaaaaaaaaaaagagagagagaagataactggggtgcagttagaagacaaaaagatccttcttcccacatcacagtgaatatgtgaaactcctcttccctgctagaaggaagtaagggaaaatggtctacttcctacagagcagcaccttggagtttgcagtgctaacctctacacacacctttctaagcatctcctttgataacagggccatcctttactatctgacttgaaggtcttacagtttcctaaatcattgcctatccatttctccttaccatcgtctcttctttttctctcctctccacgcatcctccatccccacctagacacacattctaccccattttcataaaaccttaaagggtcaatcccagcaggtataacttttccaaatccaatgcttgccgtaaagaatctgataaagtgccgggcgcagtggctcatgcttgtaatcccagcacttggggaggctgaggcgggtggatcacctgaattcaggagtttgagaccagcctggtcaacatggtgaaaccctgtctctactaaaaatacaaaaattagctgggcgtggtggctggyaactgtgatcccagctactcagggggctgaggcaggagaatcgcttgaacccaagagaaggaggaggaggttgcagtgagccaagatggtgccactgcactccagcctggacgacaagagcgaaacacggtctcaaaaaaaaaaaaaaaaaagaatctgaaaaaaccaggtggatattctgagcttaagctatgtaatccgcacggcagacactaaaggttgattctggcgctaactagtgtgtgtagagttccctcggttacagcaacagttcttgcacagcwaaactcatgctctctggataactggatgctttgccacaattaggaaaaaaaatttttaagtaggccttttaaaatgtaaaaacagttcacaaaaataacttactgaaatttatgaccaaaattttaataaaaaatcaatgatctttttgggggggaaattcagcatctaactacaatgataaaagacaagcacaaaatagctttaattttaaggtgcaaataattttacaaagtaaggattttattttatttttttttaagatggagtttagctcttgttgtccaagctggagtgcaatggtgtgatctcggctcactgcaacctccgcctcctgggttcaagcgattctcttgcctcagtctcccgagtagctgggattataggcatgcaccatcacgcctggctaattttttgtatttttagtagaaacggggtttaaccatgttagccagggtggtctggaactcctcacccgaggtgatccgcccgcctcggcctcccaaagtgctgggattataggcgtgggccactgagcctggctggattttagttttattcacttcagggataccaattttaacacccatatcagtataacatgaaattttttaaaatacagaattagaataatatttccatttgctccctttccctgttcatataacactgattgagctggttctgtgtatgaggcactgttcctttatgtacagaaccctgatgctaatataaaacactttcaagattattcacattatatgtgtctacagcttaaatgttatcgagtcactataattcaaacagatttaagatagcaaagggcattacctgtaagataagaagagccaggaaatataaattggctgctctcttaaactgctcaaacagattcattggtataaaggtaaatgcgttgtacttgtatgttttaattgcattattctgttggaaaaaataagagtcattctaaatgatgctgtatttatcacaatgtatacacatctgcaaaagtcacaagtcccacagcttacagtgacaaaggaacatcatctgtcagaaagatattgaggattttgtctgggtgcggtggcttatgcctgcaatcccagcgctttgggagaccgaggtgggtggatcacctgagcctaggagtttgagaccagcctggccaacatggtgaaaccccacctctactaaaaatacaaaaattagccaggcgtggtggcctgcacctgtaatcccagatacttgggaggctgaggcaggagaatcgcttgaaccagggaggcagaagttgcagatcgccccactgcactccagcctgagtgacagagtgagactctgccttaaaaaagaaaagaagaaagaaagatactgatatttcttttaagcttttaattctagccaagcagccaagcctcaaaatgactacttggagtcttatgacagaggcagtaacaagaaacagacatcagactgtgaccaaataaatcctgctgtcagattccttgacccattagagactgttagaaaacagggtaaaggtagacaacaacatggccaaagccaggaaaagtgaggcttttatttaagtgaggagacagagcctactatgtaagaaagagcaaaaggtactgtagtgggttgcattgtgtcctgcaaaagatatgttcaggtcttaacactaatatctatgaatgggatcttatttggaaataggatcttcgcagagataatcaagatgaagtcatacgtgattaggacaggctctaatttaatgaggtgcttattcggactggggtccctataagaggaaagttgcacacagacacacacaggaagagtgccccttgaagatggaagcagagattggggtgacttcatctgtaagccaaggaactccaaggattgccagtggccaccagaagccaggggagaggcagggaacagattctcctgcagaggctccagaaggagccaaccctgccaacaccaagatttcagacttctgatccctgcatcaggagagagtaaacttctgttgttttaagccatccagttgtggtactctgctatggaagcccttggcattaaaacacacatcttacaacatttaagcccacacttaatatttattattattattattattgagacagagtctcactcctgtcacccaagctggagtgcaatggcacaatttcagctcactgaaacctctgcctcctgggctcaagcgattctcttggctcagcctcccaagtagctgagactgtgggcacrtgccaccactccaggctaatttttgtatttcgcatttaatctttaagcattctttatcacattccaaaggtaataagcatttttgagtcaaaaatatgtttaaaatctctaaatccattccaggcagagaaggggaagataagttcttaagagattcctttcaaactcattactttcaaacaggaggcttctgtgccatcattgtatattctttcataaaacatttctaagagagcttaaaatttaaaaaagagagagaaaatttcaatctacataattctgttttgtttcaagtcacccgctacccaccccaaaggtaaacatcaataaaaatgacattctatagaaacaatgatgattatcagtagccccaggcaggtggttacgtggaaggcaggtgtagcatgaaggtagtaagcatgccagctactggaaaaaactgcattttaatgaaaacaattcagaaagttaacaactcaccgcatatttactctccttaatacacaagaattttgtgttcataaastgaggttgttcgtggtacttgcgatcgtttgctttgacttgccatgtacattctttaaaaaaaagggagaaaagttcgtaagtagcaaattaacatgttgttatgagttgaattgtgtcttccccagattcaaatgttgaagtcctaaacctccatccctcagaatgtgaccttatttggaaactgctcattgcagatgtaatcaaattaaagtgaagtcattagagaggaccctaattcaacatgactgatacctttacaaaaagggaaatttggacacagagatagatggaagacgatgcgaagtcacagggagaaaatggccatctgcaagccaaggagagaagcctagaacagatctctcccttgtagctctcagaaggaatcgatcctgctgacatcttgatgcctcgaggaaggcataagcatgctgctgctatgaaagctggaggcaagcatgctataaatcaggaagaaaatgaggaagcaggccgggcgcggtggctcacgcctgtaatcccagcactttgggaggccaaggcgggtgaatcacgaggtcaggagttcaagaccagcctggccaaggtggtgaaaccccgtctctactaaaaatagccaggtgcagtggcgggcacctgtaatcccagcttctcaggaggctgaggcaggaaaattgtttgaacccgggaggtggaggttgcagtgagctgagattgcgccactgcactctagcctgggcgacagagcaagactccatctcaaaaaaacaaacagaaaagaaaagaaaagagaatgaggaagcacctctttggcaccaagttctccatgaacatgcatgctggatgaagctcccttgagtgacgcacataatggagagaactaggtgttgatgaatccccaccaaattggcagagaagagaaattaacaatgagtgtggcacaactatttttggagatgggaatatattaaaagacacttgaaagtaaaaaattacaaaaatatcagtcttaacaactataataataaagattgtgtgatcttcggctcactgcaacctctgcctcccgggttcaagtgattcttctgcctcagcctcctgagtagctgggattacaggtgcctgccaccacacccggctaatttttgtatttttagtagagacggggtttcaccatattggccagtctggtcttgaacttctgacctggtgatccaccagccttggcctcccaaagtcctgggattacaggcgtgagccactgtgcctggcaaaatgatgtattttctagactcctactccaaaggaaatatagacaatatggcaagagtaacaagtgtaggccgagcatggtggctcatgcctgtaatcctagcactttgggaggccgaggtggatggatcacttgaggtcaggagttcaaaaccagcctggccaacatggtgaaaccccgtctctactaaaaacacaaaaaagtaatggggcatggtggtgcatgcctgtaatcccagctactcaggaggctgaggcaggagaatctcttgaacctgggaggcagaggttgcagtgagccgagatagtgccactgcactccagcctgggcgacagacggaaactctgtctcaaaaaaaaaaaaaaaaaaaaaaagtaacaagtgtagactattgaggaatgcaaataattaacctgattgcttttttaaagccacaatatcactattgaacatttttctcgcatcattttggctgcctttcatcgggtaatcataacagttgtgttattacaaatgaaaatgttcctggtatctttgtagctcaagtgcaatcttatcaaaagggaaaataaaaatggaaatataaagccactcataagcactgtaatcacatakgcaatcagaacagctcattccactcaaaaaggcgttctcaaagtaggtagataagaccttacataaggtactcttgaatccattctatttggtggtaatttgcaaatgcatgtgcttttaatggtttactttagcacacagatgacttgtgacacatccccrccaccagggttctagaacactgttcagaaccactgttacgcatttcaggaaggctgagaagaaaaacagacaagatttctcaagaagacagaaaaggccaataagggatttttaaaaagtcaattttagaaataactcaagtggaaagaagaaactgccctgttaaggagctggacataatgatctttcccagtccacttctggtccatcccccttgtggctctataaatttgcttcataattaagccaccagctggtggtggctctgtctggtcccagcactataccctcatccctggccaattttgatttggatgattcagacagagagggtggcatcagacctcgagtaggtgcagtgaggggttaccagaaatgaccttgatctcttaatttyacacttctgccaatactgtggggagcctggagaaagtaaccagtatgtctttgtctgcaattgaaccgcaaacacgtttttactcaattttagaaatctgactgcagtcaagtaatcaataaccctatttccagttaaagatccttgtttggcctaattcagacaaatcaggggacaaacaaattgatgtctactctttattcatctatgagtttaggctaattgcttgagctgtatttcaatgagataccatgaaaatatgaaaacagagctccatggacagacacacttgcagaagacagcaccttgcaaccctctcttggaagttcggtggatttgctkgtacattaaaggctgtgagaagtcctgtagtaaataaactgattttattttataagttaaatgtttaaaatgctttaatatttaaaatagcttttccaaaattaatataatcataggcactttttaaaaaatcacagaacacttattaacatcagttaagaagtgctgcactgatacacatgcctttaggaagggcagcaaaacagcacgtggaggaattgacctttttgagcaaatatttattttaagtgtctgcttggaacagagaactttactggacacttgaactacaaagataatttacagaaagagtaagcatcttgccccattttctttttttgtccttttttctttcttttttcatttttttttttgtttgagacagtcttgttctgtcatccagggtggagtgcagtggtgcgatctcagctcactgcagcctctgcctcccaggttcaagcagttctcctatctcagcctcccgagtagctgggactacaggtgcacaccaccacgcccggctaatttttgtatttttagtagagacagggtttcaccatattgatcaggctgttctcaaactcctaacctcaggtggtccacctgcctcgacctcccaaagtgctgggattacaggcttgagtcaccatgcctggccactttttcttttcttttctttttttttttttttaagagacggagtctcactatgttgcccagtgcctaggctggcctcaaattcctgggctcaagtgatcctcctgcctcagccttcagagtagctgggattacaggcatgcaccacactgtgcctggctcatctcattttctagaatggatatattgacaaagaaaagagaagaaataagaaatgcaaaaaatgcaccttcaccatatggccctttagctaaaagctacaaagctaacaagggtgtgccatcagaactatccatgtacatgtacagagatgattttaacagctgccatgtgacatgtggcttaaagtcaccctgagtctactaaatggttgtgttgtcaatatatctaaatatggctacgtgctctccagagtgttcccatgatcaccacgtcctttgatcagtgccatctggaagagcagatgagtgcagccctcctctcatcctctctgtgctggctccgaacgcttgcttacagacccaccaacaaccaagaagctgcactggttggtacacactgcagcaaacaaggaaaacaagtagataaaaagtccaacatcaaaaagaaaaaaaaaccatagaaacaattgaagagagaatggctaaaggacatgaaaagacagttcatacaaagggaaattcaatgctgttctcgctgaggctggagtccartgatgcgatctcagctcactgcaacttccgtctcctgggttcaagagattctcctgcctcactctcctgagtagctggggttacaggcgcccaccatcatgcccggctaatttttgtatttttagtagagaccgggtttcatcatgttggccagactggtcttgaactcctgacctcaggtgatctgcccacctcggcctcccaaagtgccgggataatgggcatgagccactgtacctggcctcaaatggctcttaaacctgtgagaagatatttgggttcctaaaagagaaatgcaattcttcactgagatagtagtttttatcctataatagcaaaayattggcacatggtaatgcttgggatgacattctaggttcaaaagagagcagagaaacagacactctgaggtagcctttatggagagtaatttggccagatctcaaaatttaacacacacatgcactgaccaaataatcacacttctaggaaatatcccccatgtacctactgcagggattttcaatgcagccctatttatcagaacgactagaaacaacccaaatgcctactgggaacagccagttaaacacgattacaatgatagcctatgcagtcagcaaaaaaagaatgaggtgaccccataaatatggtaggaatkacctccaaattacactgttaagagacaaaagcagaagggtatctaccatcttgtgctttcagctgtgtgatgcatagaattcatacacaatatgaatgcatatatgtacacacacgtgcacatctgtttctgcatatgtgtatgggtatatgaggaagcaagtttgcaagcattctttgcgcatacaaacgtgtatctctctggaaggacatattttgagaaactggtaaccgtaatttctttttgtcatttttttaaaagacaaagtctcactgtggcacctgggctggagtgcagtggcatgctcatagctcactgcagcctctgaactcctgggctcaagtgatcctcccacctcaacttctggagtagctgagactaaagtgcacgccatcgtacctaatttttaaatttttttgtaaagatgaggtcttgctttgcagaccaggctggtcttgaactgctgcccacaagctatcctcctgccttggcctcccagagtgccgggattacaggtgtgagccaccgtgcccagaccagcagtattttttttggaaaggaaactgcatgactgagggacaggagaggcaggaaggaaaacttcattttcattctggacccttttctaattggatcatttacatgtattactgttttaaagcaatgtttgtgattcctctccttccctctattggcatatatatatatatatatatggcgaatatggagaggagcaaggtggccaaatagaagctcgcacgaattgtaattcccataggaacatcaaatttaacaactatctacaaacaaaaaagcacctttataaaaaccaaaaaatcaggcactcacagtacctggttttaactttatattgctgaaaaaggactgaagagggtaggaaaaatagtcttgaattgccaatgccacccctcccccagccccagcaccagatgtgtggcatggagagaaaatctgtacgcttgggagagggacagtgcagcgattgtgaggctttgcactgaactcagtgctgccctgttacagacagtagaaagcaaaagcaggctgaactcagctgatgccagaccatagagggagcatttagaccagccctagccagaggggaatctcctgtaccttggtcagaacttgaattctggcaaacctcgtcaccgagggccaaagtgccctggggctctaaataaaattgaaaggcagtgtaggccccatgaactacaactcttaggcaagtcctagtgctgagctggacttggagccagttgacttagcaggcacatgacctactgagacaccagccagagcagctagtggaatgcttgctcggcccctccccgccaacctcactgctccaaaagagacctcttccttctgcttgaggagatgagagggaggagtaaagagaactttgtcttgcatcttggataccagctcagccacagtaggatagggcaccaggcagggtcatgaggctgtttcaggccctagttcccagacaacatttctagacaatcctggatcagaagggagcctgctgccttgcagggcaaggacccagctctggcaggatccatcacctgctgatgaaagagcccttgagccctgaataaacagtagtgatacccagttaatatccaaggctgtgggccttaattgaggctaagatattctggctttagttgtgacccagcacattcccagctgtggtggccatggtgagagattccttccgcttgagaaaagcagaaggaaaattaaagggtgctttgtcttgctcttgatctttctctttctttctttctttctttccttccttccttccttccttccttcyttccttccttccttccttccttccttccttccttccttcyttcyttctttctttctttctttctttctttctttctctttctttctttcttttttctttctctctctctctttctttcttttcagagatagagtcttgctattttgcccaggctggagtgcaatggtgtcatctcagctcactgcaacctgtgcctcctgggttcaagcaattctcatgcctcagcctcctgagtagctgggattacaggcatgtaccaccatgcccagctaatttttaaaaattttttattttattttattttattttattttatttgagatggtttctcactctgtcacccaggatggagtgcagtggtgcgatctcagctcactgcaacctccacctactgggttcaagcaattctcctgcctcagcctcccgagtagctgggattagaggtgtgtgccaccatgcttggctaattttgtatttttagtagagatggggttgcaccatgttggtcaggccagtcttgaactcctgacctcaagtgttccacccaccttgacctcccaacatgctgggattataggtgtgagccaccgtacccagctgtgccaggctaatttttgtattttttgtacagacagggtttcacgatattggtcaggctgatctcaaactcctgacctcaagtgttccacccactttggcctcccaaagtgttgggattacaggagtgagccaccgctcccggcctaattttttttatttttagtagagacagggtttcgccatgttggccaggctggtctctaactcctggcctcaagtgatctgcccgcctcagcctcccaaagtgctgggattacaggcatgagacactgcgcccagcctgccttgcacttgctaccaccttggccacagtggggtaaagcaacaaatagagacccctcttggggtccctgagtctaggccttaggttcttggatgacatctctggacttgctttttgccagaggggagctcactgccctgaagggtgactgaaaggatttaccacaagctgactgaagaggccataggcctttaccraacatcagcagtaacctggcagcactcctcataggcctgtggtggtggtggacatggggagaggcccctgagcctgtggaaagggcagaatagtggaaaggactggctaatggtttgagtgccagctcagccacagtagaatagataggacaccaagcagatttctaaggttttggactccagtccatggctcccagatggcatctctggatctggctgcagcctgggggaactcactggcttgaagctagcctggctggcttcacaacagggcattgagggaacataggcagccagatcatggttacagtgggccatggcgagacccagtgtggtgccagcttcatgtctgacccagtacattctcagtggtgatggccatattggtgcttgtatctccacccccctagctctgggtggcccagaacagagggagagagagaaggagaaagggagaggagggagggggggaagggggagagagaaagagcaaaaaaagagagagagagagattgattctgtttgggagaaagtaagcaacaagaacaagagtgtgggcttgataatccagataattcttccagatagtctgcaagaaatgcagcgttattgagcttgggatgccccctaatgcagatatgggttcaatcataatatccaagttcttttgaatacctggaaatccttcccaagaaggatgggtataaacaagcccagactgtgagagctacaataaatatctaactcttcaatgcccagacattgatgaacatccacaagcatcaagaacatccaggaaaacatgacttcaccaaacaaactaaataagacaccaggggccaaacctgcagaaacaaaactatatgacctttcagacagaaaattcaaaattgccattttgaggaaactcaaagaaattcaagatagcacagagaagacattcagaactctatcagataaacttaacaaagaggaaactcaaagaaattcaagacaacacagaaaaagtttagaattctatcagataaatgtaacagagattgaaataattaaaaagagtcaagctgaaattccggagttgaaaaatgcaaccgacatactgaagaatgcatcagagacttttaataccaggattgaataagtggaacaaagaattagtgagctggaaggtaagctattggaaaatatggtcagaggagacagaagaaaaaagaataaaaaagaaagaagtacacctacaagatctagaaaatagacttaaaaaagcaaatctaagagttattggcattaaagtggaggtagagaaagagacaggggtagaaagtttattcaaaggataataacagagaacttcccaaacctagaggaagatatcaatatccaagaacaagaaggttgtagaacaccaagcagattaacccaaagaagactacctcaggcatttagtaatcaaattcctaaaagtcaaggataaaaggaaggatcctaaaagcagcaaaagaaaagaaacaaataaaatacaatggcactccaatacgtctggcagcagacttttcagtggaaaccttataggccaggagagagtggcatgacatatttaaagtgctgaaggaaaatatattcaagcataaaggagaaatgaagaccttcccagacaaacaaaagctgagggatttcatcaacactagacctgtcctacaggaaatgctaaacagagtacattaatcagaaagtaaacgatgttagtgagcaataagaaatcacctgaaggcacaaaactcactggtaacagttaagtatacagaaaaacccagaatagtataacactgtgactgtgacatgtaaactactcttcagtaaaatgactaaaagattaactgataaaaaatagtgactagaacaacttttcaagacatagtacaataagatataaatagaaacaataaaaagttaaaaagcagagggaggaagttaaagtgtagagtttattagttttcttttagcttaaaataatgagttattagacagtacttacaagcctcatggtaacctcaaatcaaaaaacatacaatggatatatacaaaataaaaagcaggaaattaaagcacaccacaagagaaaaccaccttcactaaaaggcagaagggaagggaggaaagaaggaagagaagaccacaaagccaccggaaaacataacaaaatggcaagagtaagtccttacttatcaatataacatcgaatgtaaatgggctaaactgtcaatcaaaagatatagagtggctgaatagatttaaaaaaaaaaaaracccagtgatctgttgcctacaacagacactccacctggactgaaaatgaagggattgaagaagatattccatgccaatggaaagcaaaaaagaacaggatacctatatttatatcagacaaaatagatttcaagacaaaactataagaagagacaaagtcactatataatgataaagaggtcagttcagcaagaggatataatagttttaaatatttatccaccttacactggagcacccagatatataaagcaaatattactagagctaaagagagtgatagaccccagtaaaataatagctggagacatcaacactacactttcagcactggacagatcttccagacagaaaatcaacaaagaaacatgggacttaatctgcactatagaccaaatagatatttataaaatatttcatacaacagctgtagaatacacattcttttcctcagcacgtggatcattctcaaagacagaacgtatattaagtcacagaatgagtcttaaaacattcaaataaattgaaataatatcaaacatctctgactgaccacaatgagtaaaactagaaatcaataataagaggaattttggaaactatacaaaaacatggaaattaaacaatatgttcctaaatgaccagtgggtcaatgaagaaattaaacaggaaactgaaaaatttcttcaaacaaatgataatggaaacatgataaaccaaaacctgtgggacacagtgaaagcagtactaggagggaagtttatagctatacgtgcctacatcaaaaaataagaaaaacttcaaacaacctgatgatgcatctaaaagaactagagccaggtgcagtggctcacgcctgtaatcccaacactttgggaggccgaggtgggcagatcatgaggtcaggagatcgagaccatcctggctaacacactgaaaccccattgctactaaaaaaatacaaaaaacttaggtgggcacagtggcgggcacctgtagtcccagctgctggggaggctgaggcaggagaatggcatgaacccgggaggcggagcttgcagtaagccgagatcacaccactgcactccaacctgggtaacagagcaagactctgtctcaaaaaaaaaaaaaggtttcagctgtcaccagacaaaaaaacgaactagaaaggcaagagcaaaccaaacccaaagttcttgggagaaaataaataataaagatcaaggcagatattaatgacttgaaacaaagaaaacaatacaaaagatcaatgaaacaaaaacggttttttgttttggtttggtttggtttggtttttttttggagacagagtctcactctgttgcccaggctggagtgcagtggtgcgatcttggctcactgcaacctccgcctcccaggttcaagcaattcttgtgcctcagtctcctgagtagctaggagtagccaggactataggcatgtgccaccacacctggctaatttttgtagttttagtagagacagggttccactgtgttggccaggctggtctcaaactcctgccctcaagtgatccacctacctcagcctcccaaagtgctgggattacaggtgtgagccactgtgcctggccaagaagttagtttcttgaaaagataaacaaaattgacaaacctttagctggactaactaaaaaaaaaaaaaaaaaaaaaaagcaaaaaaagagagacccaaataaataaaatcagagctgaaaaagaagacattacaactgttaccacagaaattcaaagatcattagtggctactatgagcaactatttgccaataaattggaaaatgtagaaaaaaatggataaattcctagatacataaaacctaccaagattgaatcataaagaaatccaaaacccaaacagatgaataacaagtaatgagatcaaagccataataaaaagtctctcagcaaagaaaatcccaggacccaatggcttcactactgaatactaccaagcatttaaagaagaactaataccaatcctactcaatctattctaaaataaacaggaggaaatacttccaaactcattctacaaggccagtattaccctgatgccaaaaccagacaaagacacatcaaaaaacaaaaacaaaaacaaaaagacctataggccaatatcattgatgaatgttgatgcaaaaatcctcaacaaaatactagaaaattgaattcaacaacacattaaaaagatcattcatcatgatcaagtgggatttatcccagaaatgcaaagattgttcaacatacacaaatcaattaatgtgatatgtcatgtcaacagaatgaagggcaaaaaccatatgatcatttcaattgatgctgaaaaagaatttgatacaattcaacatcacttcatgataaaaaaaatcctcaaaaaactgggtacagaacaacatacctcagtataataaaagccatatatgacagacccatagctagtatcaaactgaatggggaaaaactaaaagcctttcctcttagatctggaacatgtcaaggatgcctactttcaccagaagtcctagctagagcaatcggacaagagaaagaaataaacggcrtccaaattggaaaggaataagtcaaattatccttgtttgcggatgatatgatctcatatttggaaaaacctaaagactccaccaaaaaactatcagaactggtaaacaaattctgtaaggttgcaagatacaaaatcaacatacagaaatcagtagcctttctgtatgccaacagcaaacaatctgaaaaagaaatcaagaaaataatcccattgggaggagccaagatggccgaataggaacagctccggtctacagctcccagcgtgagagacacagaagaccggtgatttctccatttccatctgaggtaccgggttcatctcactagggagtgccagacagtgggcgcaggccagtgggtgcgcgcactgtgcgcgagccgaagcaaggcgaggcattgcctcacctgggaagcgcaaggggtcagggagttccctttccgagtcaaagaaaggggtgacggacgcacctggaaaatcgggtcactcccacccgaatattgcgcttttcagaccggcttgaaaaacggcgcacctagagactatatcccacacctggctcggagggtcctacgcccacggaatctcactgattgctagcacagcagtctgagatcaaactgcaaggcggcagcgaggctgggggagaggtgcccgccattgcccaggcttgcttaggtaaacaaagcagccgggaagctcgaactgggtggagcccaccacagctcagaggcctgcctgccactgtaggctccacctctgggggcagggtacagacagcagtaacctctgcagacttaaatgtccctgtctgacagctttgaagagagcagtggttctcccagcacgcagctggagatctgagaaccaacagactgcctcttcaagtgggtccctgacccctgacccccgagcagcctaactgggaggcaccccccagcaggggcacactgacacctcacacggcagggtattccaacagacctgcagctgagggtcctgtctgttagaaggaaaactaacaaacagaaaggacatccacacagaaaacccatctgtacatcaccatcatcaaagaccaaaagtagataaaaccacaaagatggggaaaaaacagaacagaaaaactggaaactctaaaacgcagagcgtctctcctcctccaaaggaacgcagttcctcaccagcaacagaacaaagctggatggagaatgactttgacgagctgagagaagaaggcttcagacgatcaaattactctgagctacgggaggacattcaaaccaaaggcaaagaagttgaaaactttgaaaaaaatttagaagaatgtataactagaataaccaatacagagaagtgcttaaaggagctgatggagctgaaaaccaaggctcgagaactacgtgaagaatgcagaagcctcaggagccgatgcgatcaactggaagaaagggtatcagcaatggaagatgaaatgaatgaaatgaagcgagaagggaactttagagaaaaaagaataaaaagaaatgagcaaagcctccaagaaatatgggactatgtgaaaagaccaaatctacgtctgattggtgtacctgaaagtgatggggagaatggaaccaagttggaaaacactctgcaggatattatccaggagaacttccccaatctagcaaggcaggccaacgttcagattcaggaaatacagagaacgccacaaagatactcctcgagaagagcaactccaagacacataattgtcagattcaccaaagttgaaatgaaagaaaaaatgttaagggcacccagagagaaaggttgggttaccctcaaagggaagcccatcagactaacagcggatctctcggcagaaaccctacaagccagaagagagtgggggccagtattcaacattcttaaagaaaagaattttcaacccagaatttcatatccagccaaactaagcttcataagtgaaggagaaatcaaatactttacagacaagcaaatgctgagagattttgtcaccaccaggcctgccctaaaagagctcctgaaggaagcactaaacatggaaaggaacaaccggtaccagccgctgcaaaatcatgccaaaatgtaaagaccattgagactaggaagaaactgcatcaactaacgagcaaaatcaccagctaacatcataatgacaggatcaaattcacacataacaatattcactttaaatgtaaatggactaaattctccaattaaaagacacagactggcaaattggataaagagtcaagacccatcagtgtgctgtattcaggaaacccatctcacgtgcagagacacacacaggctcaaaataaaaggatggaggaagatctaccaagcaaatggaaaacaaaaaaaggcaggggttgcaatcctagtctctgataaaacagactttaaaccaacaaagatcaaaagagacaaagaaggccattacataatggtaaagggatcaattcgacaagaagagctaactctcctaaatatatatgcacccaatacaggagcacccagattcataaagcaaatcctgagtgacctacaaagagacttagactcccacacattaataatgggagactttaacaccccactgtcaacattagacagatcaacgagacagaaagtcaacaaggatacccaggaattgaactcagctctgcaccaagcggacctaatagacatctacagaactctccaccccaaatcaacagaatatacatttttttcagcaccacaccacacctattccaaaattgaccacatagttggaagtaaagctctcctcagcaaatgtaaaagaacagaaattataacaaactatctctcagaccacagtgcaatcaaactagaactcaggattaagaatctcactcaaagccgctcaactacgtggaaactgaacaacctgctcctgaatgactactgggtacataacgaaatgaaggcagaaataaagatgttctttgaaaccaacgagagcaaagacacaacataccagaatctctgggacgcattcaaagcagtgtgtagagggaaatttatagcactaaatgcccacaagagaaagcaggaaagatccaaaattgacaccctaacatcacaattaaaagaagtagaaaagcaagagcaaacacattcaaaagttagcagaaggcaagaaataactaaaatcagagcagaactgaaggaaatagagacacaaaaaacccttcaaaaaatcagtgaatccaggagctggttttttgaaaggatcaacaaaattgatagaccgctagcaagattaataaagaaaaaaagagagaagaatcaaatagacacaataaaaaatgataaaggggatatcaccaccgatcccacagaaatacaaactaccatcagagaatactacaaacacctctacgcaaataaactagaaaatctagaagaaatggataaattcctggacacatacactctcccaagactaaaccaggaagaagttgaatctctgaatagaccaataacaggakctgaaattgtggcaataatcaatagtttaccaaccaaaaagagtccaggaccagatggattcacagccgaattctaccagaggtacaaggaggaactggtaccattccttctgaaactattccaatcaatagaaaaagagggaatcctccctaactcattttatgaggccagcatcattctgataccaaagccgggcagagacacaaccaaaaaagagaattttagaccaatatccttgatgaacattgaatgcaaaaatcctcaataaaatactggcaaaccgaatccagcaacacatcaaaaagcttatccaccatgatcaagtgggcttcatccctgggatgcaaggctggttcaatatacgcaaatcgataaatgtaatccagcatataaacagagccaaagacaaaaaccacatgattatctcaatagatgcagaaaaagcctttgacaaaattcaacaacccttcatgctaaaaactctcagtaaattaggtattgatgggacgtatttcaaaataataagagctatctatgacaaacccacagccaatatcatactgaatggggaaaaactggaagcattccctttgaaaactggcacaagtcagggatgccctctctcaccactcctattcaacatagtgttggaagttctggccmgggcaattaggcaggagaaggaaataaagggtattcagttaggaaaagaggaagtcaaattgtctctgtttgcagatgacatgattgtatatctagaaaaccccattgtctcagcccaaaatctccttaagctgataagcaacttcagcaaagtctcaggatacaaaatcaatgtacaaaaatcacaagcattcttatacaccaacaacagacaaacagagagccaaatcatgagtgaactcccattcacaattgcttcaaagagaataaaatacctaggaatccaacttacaagggatgtgaaggacctcttcaaggagaactacaaaccactgctcaaggaaataaaagaggatacaaacaaatggaagaacattccatgctcatgggtaggaagaatcaatatcgtgaaaatggccatactgcccaaggtaatttacagattcaatgccatccccatcaagctaccaatgactttcttcacagaattggaaaaaactactttaaagttcatatggaaccaaaaaagagcccggattgccaagtcaatcctaagccaaaagaacaaagctggaggcatcacactacctgacttcaaactatactacaaggctacagtaaccaaaacagcatggtactggtaccaaaacagaaatatagatcaatggaacagaacagagccctcagaaataatgccgcatacctagaactatctgayctttgacaaacctgagaaaaacaagcaatggggaaaggattccctatttaataaatggtgctgggaaaactggctagccatatgtaggaaactgaaactggatcccttccctacaccttatacaaaaatcaattcaagatggattaaagatttaaacgttagacctaaaaccataaaaaccctagaagaaaacctaggcattaccattcaggacataggcatgggcaaggacttcatgtccaaaacaccaaaagcaatggcaacaaaagacaaaattgacaaatgggatctaattaaactaaagagcttctgcacagcaaaagaaactaccatcagagtgaacaggcaacctacaaaatgggagaaaattttcgcaacctactcatctgacaaagggctaatatccagaatctacaatgaactcaaacaaatttacaagaaaaaaacaaacaaccccatcaaaaagtgggcgaagsacatgaacagacactaatcaaaagaagacatttatgcagccaaaaaacacatgaaaaaatgctcatcatcactggccatcagagaaatgcaaatcaaaaccactgtgagataccatctcacaccagttagaatggcaatcattaaaaagccaggaaacaacaggtgctggagaggatgtggagaaataggaacacttttacactgttggtgggactgtaaactagttcaaccattgtggaagtcagtgtggcgattcctcagggatctagaactagaaataccatttgacccagccatcccattactgggtatacacccaaatgactataaatcatgctgctataaagacacatgcacacgtatgtttattgcggcattattcacaatagcaaagacttggaaccaacccaaatgtccaacaatgatagactggattaagaaaatgtggcacatatacaccatggaatactatgcagccataaaaaaggatgagttcatgtcctttgtagggacatggatgaaattggaaatcatcattctcagtaaactatcgcaagaacaaaaaaccaaacaccgcatattctcactcataggtgggaattgaacaaygagatcacatggacacaggaaggggaatatcacactctggggactgtggtggggtggggggaggggggagggatagcattgggagatatacctaatgctagatgatgagttagtgggtgcagcgcaccagcatggcacatgtatacatatgtaactaacctgcacaatgtgcacatgtaccctaaaacttaaagtataataaaaaaaaaagaaaaaaaataatcccatttataatagctatgaataaaatagctaagaattaagtttaccaaagaagtaaaagatctctgcaatcaaaactataaattgattgcaatgatgcaagaaactaaagaggacaccagaaaaatggaatgatattccatgctcatggattggaatattgttaaaatgtccacactgcccaaagcaatctacagattcaatgcaatctctatgaaaataccaatgactgtcttcacagaaatagaaaaaaaatcctaaaatttgtatgggaaccacagaagacccagaaaagccacagctaatctaagccaaaagaacagaactgtaggaatcacactacctgacttcaaattatatgacagagctataataaccaaaacaacgtggtattggcataaaaacagacacacagatcaatggaacagaaaagagaactcagagataaattcatacatccttagtaaacttgttttcaacaaaggtgccaagaacatacattggggaaaggcagtctcttcaataaatgatgcaaggaaaaactgcatatttatatgtagatgaatgaaagtagaccccatctcttgtcatatgcaaaaattgaatcaaaatggattacagacttaaatctaagacctcaaactatgaaactactccaagaaaaccctggggaagtctgagcatggtggctcacgcctgtaattccagcactttgggaagccaaggtgggtggatcacaaggtcaagagatggagaccatcctggccaacatggtgaaaccctgtctctactaaaatacaaaaagttagccgagcatggtggtacatacctgtagtcccagctactcgggaggctgaggcaagggaattgcttgaactcaagaagttgaggttgcagtgagccaagatygtgccactgcacttcagcctggtgacagagcaagactctgcctcaaacaaaaacaaacaacaacaacaaaaaaaccacttgggaaactctccaggacactaaactgggcaaagatttcttgagtaatacttcacaagcacaggcaaccaaagcaaaaacggacaaatgagatcacaagttaaaaagcttctgtaaagcaaaggaaacaatcaacaaagtaaagagacaacagaatgggagaaaatattcaggccactgaattcattttaaatgatagattcttccccttgcctcatcccagaaccactctgtatcttcaggggctgggtccaggcacctagagagtttgtaaaaattccacaagaggttctgatgtacaggcaggactgagaacccccagttagtgcaaaggagagtgtcttcctatggtgacttctatcattaaaaatctacttctgaacttgggctgcaaagtagcaggaagaaaaccmccagctgagttaggtttccatgagcaagagattcttacccaaggttcaatcataaattacatgacttgaaagcaaattctctaaaatgagcatgttgcccaagatcttaaaaataaatagaataggccgggcacagtggttcatgcctgtaatcccagcactttgggaggccagggtgggcgaatcaccttaggtcaggagttcaagacaagcctggccaacatggcaaaattccgtccttactaaaaatacaaaaattagctgggcgtgatggcgggcgccggtaatcccagctactcgggaggctgaggcaggagaatcacttgaacccgggaggcggaggttgcagtgagctgagatcacgccacttcactccagcctgggcaacaagagcgagattctgtcaaataaataaataaacaaataaataaaaagaataaaataaaatgagatggcacagtatcaccacccttccccatcagtaatcactcagtgcaggaatacccctcaccctgcggctttacaagcatcaattactctggtgtttttaggctgtggaggtggatggtaatttacaaccgatcagagaaagaaagaaaataagtagccagagtagactcccatatgtggtatgtgccgaaaatggaaaattcatcttattaagtggaacagctccctcagcacttttcacagattccctaggatatcctacgattgatacgtttcaatgagccatctttatctgtgttttggttccaactaaatattaattcatagatgcgctaaagaccccacattcttaattccagattattttatgaagatatcactttaaggccgggtgtggtagctcacgcctataatcccagcactttgggaggctgaggctggtggatcacaagttcaggagatcgagaccatcctggccaacatggtgaaactctgtctctactaaaaatacaaaaattagccaggcgtggtagcatacgcctgtaatcccagctacttgggaggctgaggcaggagaatcgcttgaacccaggagcggggttgcagtgagccgatatcgcgcctctgctctccagtctgggcgacagagagagactccatctcaaaacaaaaacaaacaaacaaacaacaagaaaactccaaaaatacaaaaactagtgtttcccagaacacatgctgagaagtgtgttcatcaggaaacgacagagctcatcccatagcactgaaaacattcccgctcatttctgagaatctttgctgaatctttacacaaagggtaaagttactccactcgaacctgtgggcttatctttctccatggcacattctaacagcatgtttgtgcctgtccttccttctcacaaaacacaataaaggtccttctagtgaaaagtactctgaatgggtctctcaaagcacttgtttaacaggaaagcttagttgggctagaggatttcctttctttaaaaaaaaaagaaagcaactttctgtgctacaaccctcattaaagaaactagcgcagttcaggctgcttaggcagtgttttgctagaatgggtgctggtccctggtgttagtctggtggtacctcgcagggtgactcatgttctgatgtcttaaagaactgattctctgaaggaaattattcaggatgtgaaatgtcaagaaagacagatgatgattaaaaaaagaaagagaagtcagggtgacactgaccttaactgggaaattgcacaaatgagaatatagtgggaaaggaaagagggatgaagagggcaaagagaggaagggaggaaagaaggagagcagactggctgtgagggaggcagggcacatgggaaatgggaggaaagaggtctggcatttactgaacatcatctgtgtgcttgggaagggcgcagagaggtattagaataagaatttttgtaaaaagtcacaggcaaagtcatttgatatgggttttgagaagcgagaaccacccaaatcccctaggaatataaatcacccttggaaaacatgactaagattcaagactgagcattttttttttttttttgagatggagtctcactttgtcacccaggatggcgtgtagtggtgggatcttggttcactgcaacctccatttcccaggttcaagcgattctcctgcctcagcctcccgagtagctgggattataggtgtgcaccaccatgccgggctaatttttgtatttttaatagagatggggtttcactatgttggccaggctggtctcgaactcctgacctcaggygattcaacttccttggcctcccaaagtgctgggattacaggcatgagtcaccgcacccggccaagactgagctcttttaatgcccatataccgagggtagaaatctacaaaacrtatgacctgcaaactgaatgatcaggaaaggatcctaaccaccagaatgggcaggcagagttgtaaaaaaacaggggatgagagtttccacccactacatgcgtctctgacatttctgcaggcacccaatcccggtccctttgctgtgtctcggactacacrtctgatggcgtgccaccaagcaccaagagcaaagttgaccctggaccccatggagccaattctcctgccaccccatcagatatctacatttggtagagattccaaaattgtgataggagactaagcagtgcaattagcggggaaaggaatgaggaagaagcatgttttattcactgtttgggcaatcaactagaacttccttgtaacttgtctggctgcttcagctttagctagttcaccaatatccagtctggacctgttatgacagaggccaccttcctgttcagattggtgggaattccattttctttctttcttttttttttttttttttgagttggagtttcactcttgttgcccaggctggagtgcaatggcaccatctcagctcactgccacctctgcctgccgggttctagtgattctcctgcctcagcctcccaartagctgggactacaggcacttgccaccacgcctggctaatttttgtatttttagtagagagggggtttcaccatgttggtctggctggtctygaactcctgacctcaggtgatccacycacctcagtctcccaaagtgctgggattgcaggcrtgagccactgtgcccggcaggaatttcactttaattttggtcaagtatcatgagtttagtaccttctgattcaaggcagaaggcacttaagctcaatcctcaacagcttgaaatcaaaaccagaaacccactctaagaggtaatccatctaaatgtttgctatggaaaggtagcggacacacaacatacaggagtcaatggcctccccacatttgggtgagatggggctcscggggtgcatgcactccccacactgagaatctccccacaggcagattctgtgaccagaacaggaagaatcattgcagaaaygggatttcatgcatatcacatcttctacaggttaaaattattagaaaaaaatagctcatccagatagcagaacccaagaaagagaaactagagggggggtttggcatgggggaaaaagaggcttctagaaagcctkcaagggcagaatggcagtaacagagacctcgggaaaaccagctaaaatccgaggcttctctgactaaggctgcagggaggcgtgtctggagcgctgaaaccagaacactatgatgatttctgtgaatgtgatgctaaggttgttcggctagaattttasggaacaccatggaggaaatattttcagcctgatatcaaatctggggtccagagagaaaagtctcagcttgctcatggagaagagctacaagagaagcccacatctgtttgccagggtgggagaaccagcaggagatgaaatagaaaagccacaaaagaaaaggcatcatggtaaaagcaagccatgttctactgccytcagtgatgtactgtctgcggtcacttacactcaacattggcagagaccacgtggtccacaaagcctaaaatgtttacttgctggccctttacagaaaaagtttgctggccttggtctagaccctgcctctgatgctggcctgaccctgggcagaccatatayatatatatatatacacacacacacacatacacaaggatggttatttatataactcataccgccaatttaacaatactaatagttaacatctaagactgattgatatgtatcctttaaaaatttctgggtgcagtaacatgcagattcttgcccgcataactccattttaagaatatatacactggctacgcatcgtagctcatgcctgtaattccaggagtttgagaggttgaggtgggcagatcccttgagctcaggagtttgagaccagcctgggcaacatagtgaaataccatctacacacacaaacacacacacaaatacaaaaattagttggacatactggtgcatgcctgtagtccagctactcaggaggctgaggtaggaggatcacttgagtccaggaggtcaaggctgcagtgagccgagttcacaccactggactccagctggggagacacagtgagaccctgcctcaaaatatatatatatatatatatatatacacacacacactaacaaagaccttaatgtattttctctgcagaacttgtcagatatgctctcccagcccttcttactaaggacaatgggtacttgtccaagcccatccaccattctgtcagtcgcatcctaagaagagatcagagaagattcyctcctagaccacgcaaaatagaccgatcatctttggcacgtgtggccatgacccacatgaggatttataagcgacctagtcaccgggacttcatgtggttaccttttctgaatggctcccggttctcctctgcttccctgttgactcggttttgttctggttcaacagcagacccctggtcatcaagttcatcttctgtttcatcatcactgtagggaaccacttcgtcattaggctgagaatcctcgtcaaatgtcgtttctgagtctctttctgtactcattctgctggcaaattggaactacctgcttaaaaggaaagagaaaccagagtgaattatgactcttgcccagtttttggttgaatactgcctgcatgctgctacaatgccccttttacagaacattgtctaacatgtaaatattctggaatagtacccccaaattcaacttgacatgaaaacaagaacaaaaccattcagtactgattaaatgcttgggtaagatttttttaaaaaatatggagctgcaaaccttttatttttaaacaagggtatatatatatatgtatgtgtgtatatatatgtatatatgtatatatatgtgtatatatatgtatatatgtgtatatatgtgtatatatgtatatatatgtatatatgtatatatgtgtatatatgtatatatgtgtatatatgtatatatgtgtatatatgtatatatatgtgtatatatgtatatatgtgtatatatgtatatatgtgtatatatgtgtatatatgtatatatatgtgtatatatatgtatatatatattcaaggcaatatttcaaattagggggtctcaatgaaataaatttagtgggtaacaatcaacattaaaataaaatgaaacaggctataaaatatcagattacagcacatataataagtactgcttgataaaatagttgtatacattcacacgtttatttgcattgtgggtgttagtggagttgaatttcttttttttctttttttgagatagagtctccctctgtcacccaggctggagtgcaatggcatgatctcggctcactgtcacctccgcctcctgtgttcaagtgattctcctgcctcaacctcccaagtagctgggattacaggcacacaccaccacgcccggctaatttttgtatttttagtagagacggggtttcactgtgttagccaggatggtctcgaactcctgacctcaagtcatccacccgcctcggcttcccaaagtgctgggattacaggcgtgagccaccgcgcccggccggagttgaatttcttactgtggattgctggcaaagttgacaaaccactgctctaagatatctggtttctgctaacactaacgtcctgagcctttgttctgatacaacatttttaatataaccttagatcttccaagtttactgacttcccaggaacactccctagcctttctatcttcctaactaccactgcccactctgtatctggaatttgtgtttgagcatctaccgcataagatgaccccatacaagtgagaagaacaaccttagttagatttattttaggaaaatatttacacaaatacctcaggttacagacacacagcctggcatttacataagcatcacagtgccgtgtagtcagtattgttaatgacagcagctcgcatttattttgtgttaactgcatgccaagccttgcactaagcactttatagacatgtgctctttgaaacttcccacaccaccatggtgaataacagtattattgttattcctacccagcagaggagaaaaatcaaaacactggagtgctaaataatttgcacaatgattattaaaaatttaaggcagccacgcacggtggttcacacctgtaatcccagcactttgggaggccgaggtgggcggatcacgaggtcaggagatcgagaccatcctggctaacacagtgaaaccccgtttctactaaaaatataaaaaattagccagacgtggtagcgggcacctgtagtcccagctgctcgggaggctgaggcaggagaatggcgtgaacccaggaggcggagcttgcagtgagccgagattgcgccactgcactccagcctgggcgacagagcgagactccatctcaaaaaaaaaaaaaaaaaaatgtaaggcaaaaacaactgcttcacaaggagaggtctatgctctatttttgtactatggtttatgatatattttgagtgaaaattgcctcaagtagaactatgtagctgattgcaagttttgcaccaaatcttagatctctaaaataatttttacattcacaaatggagaaattttcaaatatttatatgaggatttttaccaagtattatgtaaaacagtaaaagccaaaagcaagctgggttacaattgtcgactgtgtaaataaattgtggcatctcatattataggataatgtgcaacaatctaggtgatccgaagagtatttgatgacattgcattaatgaccttaagttaataggtaagttataaagccatatgtatagaatacacccagttattcacacacacacttgttcattttccaaaatttcaacaattgacatacattattttattattattatcttttgagacagagtatcgctctgtcacccaggctagagtgcagtggtgcaatctcggctcactgcaacctctgcctcccaggttcaagcaattctcctgcctcagcctcctgagtagctgggattacaggcatgtaccaccatgtctggctaatttttgtatttttagtagagatggggtttcaccatgttggccaggctgggacatacattattttaagtgagatgatgcatgcaaaatgctcaactcagtacctagcctgcaataagtattcaatgaacattaactgttaatttttcatatacttcttggcgatttgtatgtttccttttgaaaaatgtctattcatgtcctttgcccactttttaatggtattattattattttaaaatattgctggcattcattattacaaagaacaacttagattctactgcatgatgctgtactgtggcacagttctaaagagccctatagtcatggatgcaaagttcctagcactactggtcctcagcacctcaggccattatcttatggcttcacagaatattcattccccaaatccatagtctttacctctggccttagcttttcagtagcaagcacaagcattcctggtgagagacagggctagctggatttcctaggccgactatgaatccctaagtctagctgggaaggtgactgcatccacctttaaacaggaggcttgcaactgagctcacacctgaccaatcagagagctcactaaatgctaattaggcaaaaacaggaggtaaagaaatagccaatcatctattgcctgatgaactcatctattgcctgatgagggacaaggatcgggatataaacccaggcattggagccagcaagggcaaccccctttgggtcccctccttgtatgggagctctgttttcactctatttcactctattaaatcttgcagctgcacccttctggttaccgctagaactgagctttcgctcgccgtccaccactgctgttttgctgccgtcgcagacccgccgctgacttccatccctccaatccagcagggcgcccgctgtgctcctgatccagggaagcacccgttgccactcctgatcgcgctaaaggcttgccattgttcctgcatggctaagtgcctggtttcgtcctaatcaagctgaacactagtcactgggttccacggttctcttccgtgacccacgacttctaatagagctataacactcaccgcacggcccaagattccattccttcgaatccgtgaggccaagaaccccaggtcagagaacacgaggcttgccaccatcttggaagtggcctgccgccattttggaagtggcccaccaccatcttgggagctctcggagcaaggacccctggtaacactggcagtacttatactttcattggttatacttatacttccccggttatatttatactttcctggcagtacgtatactttcatggtttatactattttaaaattattttttattaaatggagccaaattttttaaaagtcatcttttccactaaattggcatcaccatgttaaatctaaatttccctactaagtctttattttattttactttaagttctaggatacatgtgcagaacatgcaggtttgttacataggtatacatgtgccatggtggtttgctgcacccatcaacccgtcatctaggttttaagccctgcatgcattaggtatttgtcctaatactctcccattccttgccccccccacccccacccccaacaggccccagtgtgtgatgttcccctccctgtgttcatgtgttctcattgttcagctcctgtttatgagtgagaacatgtggtgtttagttttctgttcctgtgttagtttgctgagaaagatggcttccagcttcatccatgtccatggaaagaccacgatctcattcttttttatggctgcagggattatttgtttttgagttgtttgagttccttgtatatttctggatactagtccttagttagatgaatggtttgcaaatattttctcctattcagcaggaaacactgttgattgcttcccttgctgagtagaagctttttagtttaatatagtcctatttgtctatttttgttgttgttgttgcctgtgcttttgaggtcttagccataaaatctttgcctagaccaatgtcctaaaacattttccctatgttttcttctagtataaagttttattagttttttttttttttttttttttgagaggagggtttcactctgtcactcaggctagggtgtagtaggacaatcatagctcattgcagcattgaactcttgggctcaaggaatcttcctacctcagcatcccaagtaactgggactaccagtgcatgccaccatgcctattttttttttttttttgtagcgatgggatctcactgcattgtccagactggtcttgaattcctgggtcaagtgatcctccaggcttgggctcccaaagtgctaggattataggtgtggtcccatttaagtctttaatccatcttgagttgacttttgtgtatggtgagagacaggggcccagtttcattctttagcatgtggggatttatttctgggttccctattctgttccattggtttatgtgtctgtttttagcccatattatgttttggttactacagccttgttatatatatatgtatcaaggtgactgtgaaggtactatatggaaacattttttattgttgtaaaatatatgtacataaaatttaccattttagccattttgttttgtttttctcattgcagcctcctgggctcaagcaattctcccacctcagcctcctgagtagttgagactataggtataagccactacatccgactaatttttgtgtttttagaagagacagggttttgccatattgcctaggctggtctcaaacttctgggctcaagtaatctacctgcctcagcctcccaaagtgctgggattacaagcatgagccaccacgccaggctttgtttctccctacttttatttttttttaatttcttaaagctgtaccattggagaattttaactttttgtttgttggttggttttctttctcttattattgttattatttttttgcatctcagatgacacaaaccattgtttgtttcctgagacatggtttcactctgccaccgaggctgcagtgcagtggcatgatcctagctcactacactctcaaatctgagggctccagcaatcctcctaccctgctccccagcctccctagtaactaggactagaagcacgagccaccatgcctggctttttttttctttcttttctttcttttttttttaaaagagataggctctccctatgttcctcaggctggtctcaaactccgggccccaagcaatcctcccacctcagcttccttttagcccttttcaagtgtagggttctgtggcattaagtgcatttatacaaacattttgtaagttatccttttcatcattgcttccaaactgccaggcatctggatattaagactgtctccagccctttga

SEQ ID NO: 96743 - DNA, 12483 bp, Homo sapiens
gctacattgagtgcctgaccctagaattactgcttgtgactaatggtatgtgtattggttgtcgattgctgtgtaacaagctactccaaaacttaacagcttaaaccaacacgcatttattatctcacagtttccatgaatcaagtgtctgagcacagcttaactgggttctccgtattaggatttctcacaaggctacaattaaggtgccagcccagctgatgtctcatctgaaggcaggactgaggaaggatctgctttcaagttcatgtagtgattgcaaaattcactgcattccttaagggctattggactgagggctccagtccctgctggctgttggtcaatgctaacttcacatcttgccatgtgagcctctccatagggcagctgcttcaccaaagcaaggaaggggaaagagttggctggcaacaagaagtcatggttttttataacctaatcatggaagtgacatcccattacctgcgccatattctattggttagaagcaaggttcaagctgggcacagtggctcatgcctgtaatcccagcacttggggaggccaaggtgggtggatcccaagatcagaagttcaagaccagcctggccagcatggtgaaaccctgtctctactaaaaatacaaaaaattagcctggcatggtggtgcatgcctgtaatccccgtgacttgggaggctgaggcaggagaattgcttgaaccagggaagtggaggttgcagtgagccaagatcgcgccactgtactccagcctgggcaacagagcaagactccatctcaaaaaataaagcagcaaggttcaggaactcaggcttattttaaaaaaaagaaaatgaagaagaagaaagaaggaaaaggggctggatacggtagctcatgcctgtaatcccagtattttgtgaggccaaggagggaggattgcttgacctcaggagttcaagagcatcctgagcaaactagcaagacctcatctctactaaaaaccaaaaaaattagctgggtgtgatggtgcacacctttagtctcagctacttaggaggctgaggcaggaggatcacttgagcctgggagattgaggctgcagtgagcttgatcaccccagtgtactccagcctaggtgacagagcaagaacttgaatcaacaaccaaaaaaaaaaaaaaaaaggaagaaaaaagaagcaaaccacctcatgtgtatgccacactcacaggaaattaaagatgtgaacaccaaaaggtgggatcactgggggccatcttagagtagtaatttatatttagtatggaacatataataagaaacacgtatagcatagaacatatagaaatataattcatacttattatatattacgatatgttaaatattttacagcattgtctttaataataataataaacaaaatgaggaaaaacagatttcggaaatagtctttcttcttgtgaactttaaaagccattaaaaaaaaatgatgaaggaccaggcgtggtggcttacacctgtaatctcagcatcttaggaggctgagacaggataattgctttaacccaggagacgaaggttgcagtgagctgagatcgcgccattgaactccagtctgggcaacaagagcaaaactccatctcaaaacaaacaaacaaacaaaacaaaaaacaaaactaccatagccggtatgtcagtaatgagtaagggtgcattctaataaaactttatctaaaaaaataggtagtgggccgaatttggcccatgggctgcaatttgccaattcttgtctagactataagcctcctaagtacagaaacaaacgagcctcctatatgccagactctggtaggtgctagtgatggacaagaaagattggtcctcacctttgatatcttcagtaccctactagagggctggtttggttttgcgtacatggtaaaatcttggacaatggtttttggatggcctcaaatgactcagactcctaaaaagtttcatcttgtatgacttctgaccttaactgttgctgttttctcccatcattgccctcaatctttcatccctagtccaatgactttgtgaatctgttaccatgtggtaggtgtgacctgtgtaaaggtggtaaagaactttggtgtaagacaactctctgagcccttgaagactttattgaaagttgatttgctctttccccagatctttcagtgtcaactgtgtagtaggcactgagtattcacagaccaatctgttcttgtagagtttatggtctggtgggaaaggcagataaatgaaagcaaatgcatgtttacaaatcatgataagtgttaggaaggaaacagaaatgtaggtgctcaagggggccagtggtagcaggaagaggagggcagaatcctgctcaataccatgagtggaagaggacactgaagttgagacctaacgaataagaaattggccaggcatggtggctcatgcctgtaatcctagcactttgggaggccaaggtgagcggatcacctgaggtcagaagttcgagaccagcctgaccaacaaggagaaaccctgtctctactgaaaatacaaaaaaattagctgagtgtcatggcgggcacctgtaatcccagctacttgagaggctgaggcaggagaatcgcttgaaccagggaggtggaggttgcagtgagctgagatcatgccactgcactctagcctgggcaacagagcgaaactgagtctaaaaaataataaaaataaaatacacaagtcctattggattagggccccatctgatgaccttatttaaccttaactacctccttaaaggacctctctccatgtagtcacattgaggggtgttatggcttcaacatatgacttcgggggccataattcaatccataacacccaggaagggtgtaagcaggagaatggcatgcctttggtggtcatgtggaagttaattgtggaaagtctagttagagggatctcgcagcatttccagggagagatgatggtggccatggagatagagaggaggtgatgaattggaggagtatttgaggcaaaaacgactggctttactgttttatggctttattttattttattttatttatttatttattggaggcagagtttcgctcttgttgcccaggctggagtgcaatggcgcgatctcagctcactgcagcctcctgggttcaagcaattctcctgcctcagcctcccgaatagctgggattacaggcatgtgccaccatgcccagctaatttttttgtattattaatagggacggagtttcaccatgttggcaggctggtcttgaactcttgacctcagttgatccacccgcctcggtcttccaaagtgctgggattacaggcgtgagccaccgcatccggtctgtttcctagctttaatagttgacttatctgtattcttcgaaactctggcagtcagtcagtagctctgttccctgtgcctagtgtagtactctgcaccttgcaggtgtttactggatgctgagtaaatgcacacctgtctgcagtgtcctggagtggtggtcagagacattatgaagtttccaaatccataccatacacagcacctgaccttagggatcattatttagatctgggaaaatcttccttatgtcatttagggcttcaaacaagtgatttctccctgtttttttttctttggtacactaaaatgacagagccaaattcctcccgtgtgtgtctgcgtttcacacacatgcacactgcagagaagttgagttgaggacatttcttcactctcagcggagagctccctgctcctgctttctcactgagactgtgcagattgtgtgggtggcgagttggttgtgcaaggccttgcttgctttgagtcacggacatgtgggttgtcaaatccattcctccgtgcttgcttcctctctcaacctcaaagggctggagacagtcttaatatccagatgcctggcagtttggaagcaatgatgaaaaggataacttacaaaatgtttgtataaatgcacttaatgccacagaaccctacacttgaaaagggctaaaaggaagctgaggtgggaggattgcttggggcccggagtttgagaccagcctgaggaacatagggagagcctatctcttttaaaaaaaaaagaaagaaaagaaagaaaaaaaaagccaggcatggtggctcgtgcttctagtcctagttactagggaggctggggagcagggtaggaggattgctggagccctcagatttgagagtgtagtgagctaggatcatgccactgcactgcagcctcggtggcagagtgaaaccatgtctcaggaaacaaacaatggtttgtgtcatctgagatgcaaaaaaataataacaataataagagaaagaaaaccaaccaacaaacaaaaagttaaaattctccaatggtacagctttaagaaattaaaaaaaaataaaagtagggagaaacaaagcctggcgtggtggctcatgcttgtaatcccagcactttgggaggctgaggcaggtagattacttgagcccagaagtttgagaccagcctaggcaatatggcaaaaccctgtctcttctaaaaacacaaaaattagtcggatgtagtggcttatacctatagtctcaactactcaggaggctgaggtgggagaattgcttgagcccaggaggctgcaatgagaaaaacaaaacaaaatggctaaaatggtaaattttatgtacatatattttacaacaataaaaaatgtttccatatagtaccttcacagtcaccttgatacatatatatataacaaggctgtagtaaccaaaacataatatgggctaaaaacagacacataaaccaatggaacagaatagggaacccagaaataaatccccacatgctaaagaatgaaactgggcccctgtctctcaccatacacaaaagtcaactcaagatggattaaagacttaaatgggaccacacctataatcctagcactttgggagcccaagcctggaggatcacttgacccaggaattcaagaccagtctggacaatgcagtgagatcccatcgctacaaaaaaaaaaaaaaaataggcatggtggcatgcactggtagtcccagttacttgggatgctgaggtaggaagattccttgagcccaagagttcaatgctgcaatgagctatgattgtcctactacaccctagcctgagtgacagagtgaaaccctcctctcaaaaaaaaaaaaaaaaaaaaaactaataaaactttatactagaagaaaacatagggaaaatgttttaggacattggtctaggcaaagattttatggctaagacctcaaaagcacaggcaacaacaacaacaaaaatagacaaataggactatattaaactaaaaagcttctactcagcaagggaagcaatcaacagtgtttcctgctgaataggagaaaatatttgcaaaccattcatctaactaaggactagtatccagaaatatacaaggaactcaaacaactcaaaaacaaataatccctgcagccataaaaaagaatgagatcgtggtctttccatggacatggatgaagctggaagccatctttctcagcaaactaacacaggaacagaaaactaaacaccacatgttctcactcataaacaggagctgaacaatgagaacacatgaacacagggaggggaacatcacacactggggcctgttgggggtgggggtggggggggcaaggaatgggagagtattaggacaaatacctaatgcatgcagggcttaaaacctagatgacgggttgatgggtgcagcaaaccaccatggcacatgtatacctatgtaacaaacctgcatgttctgcacatgtatcctagaacttaaagtaaaataaaataaagacttagtagggaaatttagatttaacatggtgatgccaatttagtggaaaagatgacttttaaaaaatttggctccatttaataaaaaataattttaaaatagtataaaccatgaaagtatacgtactgccaggaaagtataaatataaccrgggaaktataagtataaccaatgaaagtataagtactgccagtgttaccaggggtccttgctccgagagctcccaagatggtggtgggccacttccaaaatggcggcaggccacttccaagatggtggcaagcctcgtgttctctgacctggggttcttggcctcacggattcgaaggaatggaatcttgggccgtgcggtgagtgttatagctctattagaagtcgtgggtcacggaagagaaccgtggaacccagtgactagtgttcagcttgattaggacgaaaccaggcacttagccatgcaggaacaatggcaagcctttagcgcgatcaggagtggcaacgggtgcttccctggatcaggagcacagcgggcgccctgctggattggagggatggaagtcagcggcgggtctgcgacggcagcaaaacagcagtggtggacggcgagcgaaagctcagttctagcggtaaccagaagggtgcagctgcaagatttaatagagtgaaatagagtgaaaacagagctcccatacaaggaggggacccaaagggggttgcccttgctggctccaatgcctgggtttatatcccgatccttgtccctcatcaggcaatagatgagttcatcaggcaatagatgattggctatttctttacctcctgtttttgcctaattagcatttagtgagctctctgattggtcaggtgtgagctcagttgcaagcctcctgtttaaaggtggatgcagtcaccttcccagctagacttagggattcatagtcggcctaggaaatccagctagccctgtctctcaccaggaatgcttgtgcttgctactgaaaagctaaggccagaggtaaagactatggatttggggaatgaatattctgtgaagccataagataatggcctgaggtgctgaggaccagtagtgctaggaactttgcatccatgactatagggctctttagaactgtgccacagtacagcatcatgcagtagaatctaagttgttctttgtaataatgaatgccagcaatattttaaaataataataataccattaaaaagtgggcaaaggacatgaatagacatttttcaaaaggaaacatacaaatcgccaagaagtatatgaaaaattaacagttaatgttcattgaatacttattgcaggctaggtactgagttgagcattttgcatgcatcatctcacttaaaataatgtatgtcccagcctggccaacatggtgaaaccccatctctactaaaaatacaaaaattagccagacatggtggtacatgcctgtaatcccagctactcaggaggctgaggcaggagaattgcttgaacctgggaggcagaggttgcagtgagccgagattgcaccactgcactctagcctgggtgacagagcgatactctgtctcaaaagataataataataaaataatgtatgtcaattgttgaaattttggaaaatgaacaagtgtgtgtgtgaataactgggtgtattctatacatatggctttataacttacctattaacttaaggtcattaatgcaatgtcatcaaatactcttcggatcacctagattgttgcacattatcctataatatgagatgccacaatttatttacacagtcgacaattgtaacccagcttgcttttggcttttactgttttacataatacttggtaaaaatcctcatataaatatttgaaaatttctccatttgtgaatgtaaaaattattttagagatctaagatttggtgcaaaacttgcaatcagctacatagttctacttgaggcaattttcactcaaaatatatcataaaccatagtacaaaaatagagcatagacctctccttgtgaagcagttgtttttgccttacatttttttttttttttttttgagatggagtctcgctctgtcgcccaggctggagtgcagtggcgcaatctcggctcactgcaagctccgcctcctgggttcacgccattctcctgcctcagcctcccgagcagctgggactacaggtgcccgctaccacgtctggctaattttttatatttttagtagaaacggggtttcactgtgttagccaggatggtctcgatctcctgacctcgtgatccgcccacctcggcctcccaaagtgctgggattacaggtgtgaaccaccgtgcgtggctgccttaaatttttaataatcattgtgcaaattatttagcactccagtgttttgatttttctcctctgctgggtaggaataacaataatactgttattcaccatggtggtgtgggaagtttcaaagagcacatgtctataaagtgcttagtgcaaggcttggcatgcagttaacacaaaataaatgcgagctgctgtcattaacaatactgactacacggcactgtgatgcttatgtaaatgccaggctgtgtgtctgtaacctgaggtatttgtgtaaatattttcctaaaataaatctaactaaggttgttcttctcacttgtatggggtcatcttatgcggtagatgctcaaacacaaattccagatacagagtgggcagtggtagttaggaagatagaaaggctagggagtgttcctgggaagtcagtaaacttggaagatctaaggttatattaaaaatgttgtatcagaacaaaggctcaggacgttagtgttagcagaaaccagatatcttagagcagtggtttgtcaactttgccagcaatccacagtaagaaattcaactccggccgggcgcggtggctcacgcctgtaatcccagcactttgggaagccgaggcgggtggatgacttgaggtcaggagttcgagaccatcctggctaacacagtgaaaccccgtctctactaaaaatacaaaaattagccgggcgtggtggtgtgtgcctgtaatcccagctacttgggaggttgaggcaggagaatcacttgaacacaggaggcggaggtgacagtgagccgagatcatgccattgcactccagcctgggtgacagagggagactctatctcaaaaaaagaaaaaaaagaaattcaactccactaacacccacaatgcaaataaacgtgtgaatgtatacaactattttatcaagcagtacttattatatgtgctgtaatctgatattttatagcctgtttcattttattttaatgttgattgttacccactaaatttatttcattgagaccccctaatttgaaatattgccttgaatatatatatacatatatatacacatatatatacatatatacacatatatacacatatatacatatatacacatatatacatatatacacatatatatacatatatacacatatatacatatatacacatatatacatatatacacatatatacatatatacatatatatacatatatacacatatatacacatatatacatatatatacacatatatatacatatatacatatatatacacacatacatatatatatatacccttgtttaaaaataaaaggtttgcagctccatattttttaaaaaaatcttacccaagcatttaatcagtactgaatggttttgttcttgttttcatgtcaagttgaatttgggggtactattccagaatatttacatgttagacaatgttctgtaaaaggggcattgtagcagcatgcaggcagtattcaaccaaaaactgggcaagagtcataattcactctggtttctctttccttttaagcaggtagttccaatttgccagcagaatgagtacagaaagagactcagaaacgacatttgacgaggattctcagcctaatgacgaagtggttccctacagtgatgatgaaacagaagatgaacttgatgaccaggggtctgctgttgaaccagaacaaaaccgagtcaacagggaagcagaggagaaccgggagccattcagaaaaggtaaccacatgaagtcccggtgactaggtcgcttataaatcctcatgtgggtcatggccacacgtgccaaagatgatcggtctattttgcgtggtctaggagggaatcttctctgatctcttcttaggatgcgactgacagaatggtggatgggcttggacaagtacccattgtccttagtaagaagggctgggagagcatatctgacaagttctgcagagaaaatacattaaggtctttgttagtgtgtgtgtgtatatatatatatatatatatatattttgaggcagggtctcactgtgtctccccagctggagtccagtggtgtgaactcggctcactgcagccttgacctcctggactcaagtgatcctcctacctcagcctcctgagtagctggactacaggcatgcaccagtatgtccaactaatttttgtatttgtgtgtgtgtttgtgtgtgtagatggtatttcactatgttgcccaggctggtctcaaactcctgagctcaagggatctgcccacctcaacctctcaaactcctggaattacaggcatgagctacgatgcgtagccagtgtatatattcttaaaatggagttatgcgggcaagaatctgcatgttactgcacccagaaatttttaaaggatacatatcaatcagtcttagatgttaactattagtattgttaaattggcggtatgagttatataaataaccatccttgtgtatgtgtgtgtgtgtgtatatatatatatgtatatggtctgcccagggtcaggccagcatcagaggcagggtctagaccaaggccagcaaactttttctgtaaagggccagcaagtaaacattttaggctttgtggaccacgtggtctctgccaatgttgagtgtaagtgaccgcagacagtacatcactgagggcagtagaacatggcttgcttttaccatgatgccttttcttttgtggcttttctatttcatctcctgctggttctcccaccctggcaaacagatgtgggcttctcttgtagctcttctccatgagcaagctgagacttttctctctggaccccagatttgatatcaggctgaaaatatttcctccatggtgttccgtaaaattctagccgaacaaccttagcatcacattcacagaaatcatcatagtgttctggtttcagcgctccagacacgcctccctgcagccttagtcagagaagcctcggattttagctggttttcccgaggtctctgttactgccattctgcccttgcaggctttctagaagcctctttttcccccatgccaaaccccccctctagtttctctttcttgggttctgctatctggatgagctatttttttctaataattttaacctgtagaagatgtgatatgcatgaaatcccgtttctgcaatgattcttcctgttctggtcacagaatctgcctgtggggagattctcagtgtggggagtgcatgcaccccgggagccccatctcacccaaatgtggggaggccattgactcctgtatgttgtgtgtccgctacctttccatagcaaacatttagatggattacctcttagagtgggtttctggttttgatttcaagctgttgaggattgagcttaagtgccttctgccttgaatcagaaggtactaaactcatgatacttgaccaaaattaaagtgaaattcctgccgggcacagtggctcatgcctgcaatcccagcactttgggagactgaggtgggtggatcacctgaggtcaggagttcgagaccagccagaccaacatggtgaaaccccctctctactaaaaatacaaaaattagccaggcgtggtggcaagtgcctgtagtcccagctacttgggaggctgaggcaggagaatcactagaacccggcaggcagaggtggcagtgagctgagatggtgccattgcactccagcctgggcaacaagagtgaaactccaactcaaaaaaaaaaaaaaaaaagaaagaaagaaaatggaattcccaccaatctgaacaggaaggtggcctctgtcataacaggtccagactggatattggtgaactagctaaagctgaagcagccagacaagttacaaggaagttctagttgattgcccaaacagtgaataaaacatgcttcttcctcattcctttccccgctaattgcactgcttagtctcctatcacaattttggaatctctaccaaatgtagatatctgatggggtggcaggagaattggctccatggggtccagggtcaactttgctcttggtgcttggtggcacgccatcagatgtgtagtccgagacacagcaaagggaccgggattgggtgcctgcagaaatgtcagagacgcatgtagtgggtggaaactctcatcccctgtttt

SEQ ID NO: 96744 - DNA, 26272 bp, Homo sapiens
gctggccttctctgcctccacttttatttacttgcatcaaaactggtgtttaaaactcacaaaatgccatttcatcaaatttgtgttttcatttatgtaaggtggcttcaatgccaaagcaaattcattgttagaaaagtcaagctataaataaaaggtagctaattttgtctttcttggtttgcaaaagaagttatagacgtccaggccaggtgtggtggctcacacctgtaatcccagcactttgggaggccaaggcgggcggatcacaaggtcaggagttccagaccagcctgaccaacatggtgaaaccctgtctctactaaaaatacaaaaattagccaggcgtggtggtgggcgcctgtagtcccagctactcaggaagctaaggcaggagaatcacttgaacccaggaggcagaggttgcagtgagccgagatcatgccactgcactccagcctgggcaacagagtgagatgctgtctcaagaaaaaagaaaaaaataaaagaaattatagaggtccaagactaagtctgcgacattatttaaattttcccccaaggcccttcctggcctaccattcctaatgggtcctgtccagccctccacccatttgaggagttaccatactatcaccctccttgcacatgggtgaatccaagatccccatggaagtatgccatgctgacattcccaggcactccatcattcctcccttcatttcttcattcaacaaacatgtctgagcatgtactacgtgtcaagcactagaattgctgcagcggacgagccagctgtgtggtcactttcctccagtccccatatggggagcaagaggacgtcatgacagttcacgtgcacagtgtcactgctttgtgctctaaaaacaactttggcaagacaaaaacaaaccctgacaaaaaataaaaacagattctgtgttgacttaatacagaaaaacacattttgctaaacttctaaggagggacgaggttcctctatggtgtatagatttcactagagatatatatcatgtcctaagcaaatcgtagtgaaaaattatagagaaacacctacacaccttcaggtatcagctccagaatcactgcttccagcacttctgacctggccaagggccctccctggcttccaatggccaggtgtgctccttcaactagaccttggcctctcccatctcaggatctgcagtatctatgatgatgttgcctaatatgccaatggtactaaataaatacttgtggggccgacctgatttcaacagagaagtgtttggcctaaatactagagagaatcagtagttcaggaaacacatctcacatcaaggaagaagcgctttctaggtgtgaatgctaagatgtttagcacagcctctttgactaatttcaagtcgaagaagcaagtcagtaataatgaacctagaagccttacctcatttcgtgcaaccagagttataaaagctccttgtttatagcactcgatagcaatgcacttcccgatgccactggaacctcctgtaacctaaaacaaaatcataaaatattcttagcacttgaaatctcccctctgtaggaagtttttataaaaaacaactatgacaggctcttaaaatgaatctacaagaactaaatgattagctgttgttaacttcttcatcccaaacttaatgactggagtaagtgtaagcatgaaagatactatcagcaaggcctgctgctttgactgttttcttatggaaccataaattgcacacctataatatttttctgagttcactggtggaaaagtgccctataagtctagctcataaataatacattagtctgcctctgattccaaatccaaatgaatcttattttctttttttttttcttttttttttttttattatactctaagttttagggtacatgtgcacattgtgcaggttagttacatatgtatacatgtgccatgctggtgcactgcacccactaatgtgtcatctagcattaggtatatctcccaatgctatccctcccccctcccccgaccccaccacagtccccagagtgtgatattccccttcctgtgtccatgtgatctcattgttcaattcccacctatgagtgagaatatgcggtgtttggttttttgttcttgcgatagtttactgagaatgatggtttccaatttcatccatgtccctacaaaggatatgaactcatcattttttatggctgcatagtattccatggtgtatatgtgccacattttcttaatccagtctatcattgttggacatttgggttggttgaatcttattttcttaatgcacatttatgcaagattagctctacaacagatgaaaagaatggccacctgaatatttatttgaaatgactgcttagtataaaagtaatatacaatcacaaggaaatcctgaaaagtaaagctcttcttgcactattctacccctatctacagttcagctatactggctttcaattatggaattattcctaatattcactgttatacataaatcatgctgggaggaagatctctgactccatgttaggattttaacatcattgggaagtgtctcctacgcaaatgcacctatctctatgggactcataggcatcccttacttctttttagcttcaacctgccaccactgaagagatttatttggtgggtaatcagccagttatcagcagaagattactgtaaaaaccctccaaccacagtaccttggcacatcctacttcccttgcaacgaatgctcttctccccacttcatctgacacctactcgcccatcaaatctcagctcaaataccacttcctcaggaaagccttcactgtctcccctgcccccacactgacacacttttcagcactgtatttcttctttatgacatgcacataataaacagctctagatttatttgtgtgattatctgattcacaaccacctctcctatcacctacccataaactccattaaaaataccaattatttttctgttctccactatattcctagcacttagcctggggagggctcaatatatattatatatttcactgaataagtgaacaatgcaacattatttttctttttttttttttgagacagtcttgctcagtcacccaggctggagtgcagtggcacgatctcagctcactgcaacctccgcctcccaggttcaagcgattctcttgtctcagacacccaagtagtggggattacaggcgtgcgccagcacgcccaactaatttttgtatttttagtagagatggggtttcaccatgttggccaggctggtctcgaactcctgacctcaagttatgcactctccttgacctcccaaagtgctgggattataggagtgagccactgtacccggccatatcgttctagtcactgtccctatgcaaattacataatattgcatagtattgtctcctgtttttaaaaaattatattgtaatgtcttatttgtcaaaaaacgaaaaggtttcacaatacttcatcaaatagctgcatcaaaacttcaacgtttccctataaccagacatttagatttttcctaatattcactgttatacataaatcatgctgggaggaagatctctgactccatgttaggattttaacatcattgggaagtgtctcctacgcaaatgcacctacctctatgggactcataggcatcccttacttctttttagcttcaacctgccaccactgaagagatttatttggtcggtaatcagccagttatcagcagattactgtaaaaatatagctgttgttggccgggcgcgatggctcgcgcctgtaatcccagcactttcggaggctgaggtgggtgattttctgcttttttcctgcaattttactaccgtaactagatagaaaacactagtatataaaattgttttaaaaatgaaacaattgttataagtttgttcttaattatgtatgggcagacagtttaaccatcagctccctctcccaacaataccacagtcaactcctaacaaatctcaagaacaattacacttttcactcttcttatgacattaaaaaagaagacagatggtgacaccatgtgaactattcatgtcattctcacattacttagagtgtgaaataataatcctgcgtattaaagcgggatggtaaaaataaattcttcttggtccacctgaacagacacagcatttattatctcacctatgacctgccgcgggatggggctggaaggactggagtcaaggctcagtgaaactgtcttacaaataaggaattccaattttcattctgcgtttagctttagtttttgcaaagttatgctctataaactcaagctctgaaaggatccaaggtttaaagccacgcttttgaggcagcagttctcttgcggatgtaaaactttcagaatttagagtgtcaagttttgcctttctcttatttattttttgtaatgaatccacactctttccccattaggaacaggaggtgttggaaaaagctaatagctttacaaaggagaaattaaacagatacattttctcattcacaaacccttgtacagatttaaagcatactaagaaaaacgaccatcttattttataccagctcagcggggaggctcggatctccggtgcagagataggacaggaagaggtgtgcggccaattttgtaaccaaccctccttactcctaactcctcgcctcactgtgcctcgggtttgggagatccaaacgagaatgctcgtgagaaagccactgcaaacgggaaagtgctgggcgcaggcaaggaggcattctctctgtttaagaaaggtgccacatttgcagaacagggatcgctgaatatgcgagcttccgccaagaaataaatcacacctatccacctctccttcattcctcgcacacaagccttgtcgtttagctcatccttcccactagaaaacagcaaaggattgcattggagcagcaatcagcagatgccacgctgagctcagagacaagcagtgtagacgggacaggcgtcccaataccgctaagccaccaccgccagcccgctgggttctgagcagtttccccaggtgagtcacttcctggaatcctctggcagcggctcttcccgtcactcgcacaggccatcttccagttccgagctgcctcggcgggtcccggcggctgggaccccacttccccgctgtctgcccccgcccggggccgcgcgccgcaccctgcacaccaccgaccgctgtgtccttggcaaagtttctcagcctctctgtgcctcagttgactcatcggaaaaactgaggacaaaacatccacatcccagggatgttgcatggattcacgagcagccacagaacccctggggccccgggaaccctgcggccggcggggtcccccgtcgcacgctctccggccctaggaggagcccgaggctgcggagggcgggtccgcgaggccgggtgccggggccgggggaaaagcgccggggtggacggcggcaggtgaccttccccatttggccatgccttcctggggaccgcggcctggaaaaagggacgtaggctacgcggcctcggcggcggaaaggccgcgcgggccggtaagtcggggggcagcaacaggaggccactcaccaccacatgcgccccgggcagggcgaggggcttggggctgatgagcggagacaccatgtacagcagcagcacgaaggccacgaggaaggcggcagccagcagcagcatcgctccgcggggccaggggcccggagcggccgggcgggggccgccgggcaaggcgcgcagggctgggctgcggcgaggcgagaatcacgcgcggcgggcgggcgcctggagtgtttgggtttgcgggccggggcgggccgcggcggaggggaagaggaggagccggcgcgcgcgccacccaggcggggcggtgcttccagggggcgagtaggccgccaccgccaccgccaccgccaccactgccagaatcgcctctcgggggtcgccgggtgtctcccactcccccggcctcgggacggggcccgcagtccgcagcctctcccgtggaaaccgggcctcccgtccctgtgcgtcgcgagcgggctccggacagcgccagatgcgagcgcgccgggaagggctgcgaagactcgctcttcggragctcgaatggcttctkaggaccccgcagggcgggtttccaggcctgccacggcctccagtgtgggcgtgacgagcgctcctccctggagttcagccctsggcttgggactgcccgctgggttgctcggaggccccggagcatcggaaagggcggctggaggctcccggagcgggctcagcctgggagcccagcgactacgctctgaaatcccgggctccattccatattttttggcgtttttagaagatggtcacggcccactttcgcttttcagaggaccggaaagccttaacagggagttttgaggaatcactaaggtaattcaatttcattgagttcagagttcatctttaccaagcaggttcaaaacaaataaataacgcaaacaactcagctttattaaggtctcattcacgtactataccatacaattcccgatttaacgtgcgtaataggccgggcgaggtagctcgcgcctgtaatccccgacctttgggaggctgaggcgggcggatctcttcaggtctggagttcgagaccagcctggccatgatggtgaaacccccgtctctactaaaaatacaaaaaatcacccgggcatggtggcgtatgcttgtaatcccagctaccctggaggctgaggcaggagaatcgcttgaacccgggaggcagagattgcggtgagatcgcgccactgcactccagcctgggtgacagatcaagactccgtctcaaaaataaataaataaataaagcttataataaattgtctttaatatagtcacagttgtagacccatcactaccataaattttagaacatttttrtcacaaccccccaaaatcctatactcattggcagtcacgacccatttcctcccaagccccgcccaagcctaagcaatccctcatgtttctgtctctataawcttgcctattcgggatatttcacataaatggaatcatataatatgtagcctttttcatcctatctttcacttactgtaatgttttcaaggttcatccatgatatgaagtactacatgttaatacttcatttatttttattgccaaataatatcccattgtatgactatacgacattttaattttccattcatcaattgaggaatatttaggttgtttccactttttgactattagaattatgctaactgtaaatattcatttaccggtttttgtgtgggcattatgtttcatttctcttgggtacatgcctagtaggggagttgctacatcttacggcaactctatgtttaactatttgaggaattgccagaagttttccaaagtgagtacaacattttgtgttcccaccagcagtgtatgtgggttccaatttctctacatyttcactaacagttgttatcatccgtctttctgattatagcttttttagttggtgtgaagtctcattgtgattttaatttgcatagaggcacatatttttgtttgcttacttgcttttcatttttgttgttgtttctagaaatactagggagcgaaggagaaaaaaaagtttttcttttcctttttttcttgacttacagcagttagccaaactgcaaaatttgaaggcataatgtccaagacttctgatatcaatgcaagtttagaggttcctgaaccaccctcaggtttgatcattcactggaaggactcacagaactcactgaaagccattatgctcatagttatggtttattatggggaaagaatacagatcaaagtcagctaaggaaagaaatgcctaaggcagagtctggagggctccaaatgcaaagctcctgttgtcatctcccacggagtcaggctgtgttaccttcccagcattggtatgtgacagtatgcttggagtattgycaaccagggacacttgtctgagcttctgtgtccagagtttttactgggactccagcacataggcttgatcaattgtccacttggttggactgagactccaactagactgatagtgcatgacaaaagccccctaattcacatacttggtctctctggaatggccagtctccaccctaaaatccagtttgcccagtccccatctaaacagaggtactcctatcaggtatgacgtagataacctcccataagccaagggcaaaagtcaaaccttctctttgggcaagactgaatcctttacaacacggctgccacctggcctttggccaaagctctcttacagtaaaatgaacatatatctgacatttggaggagccagtgtagagtaggaggcttttaactcaatttctcaatacattggccatcagtgtgaacattaaaacctcacttacaatcccagagttacactgtattatgatatggtagtaaacataatttgaaaaattagagtcaaaagatagtggcagatagatataagacttccactctgccatcaacaactggtccagttcatcatcatattgtatgaccaaaatgtctcccagagaaatgccactcaggcttgaaagttcccatctgatgctatcagtttccaaaaacagaagtggccttcaccctttaggtaccagactgtctttttaacatgttttgtccaccaagtatcctatagtttttaatattaacaacttgtgtgggctcagcaatcttactggttcccatttagcatgtccaatcaatattgtctgaagggcagggccacctgtcttgtgttttacattactaggtaaaggaaattttcctcaggcaatatccatccccatagtacattcatgtaaaggggatgcaaccactccaaatagagtctcttcagacattccagtttctatccaaactttcattttaatcccatcaaatgtattttcatatctttccaatctgttgccttggttagaatttcactaacagaaaaacagtgcatggggctcccatgtcaaagaattttagaaatgtttcttttccacccctgacaatttacccattcacgtacatttggtcttggaccccagccagagattaggccaatgggcctaggttctttcttcagtttttgtttgttttgttttgtttgtgtgtgtgtgtgtgacagagtctcgctctgttgcccaggctggagtgcagtggcatgatctcggctcactgcaacctctgcctcctgggttcaggcaattctcctgcctcagcctcctgagaagctgggattataagcatgcaccaccatgcctggctaatttttgtatttcagtagagatggggtttcaccatgttggccaggctggtctcaaactcctgacctcaggtgatccacccacctcggcctcccaaagtgctgggattacaggcataagctacctgcccggcctttcttcagttcttaccttgactactttgcatatcttcaccccaggtgattggaagtcaggtttcttacagtcatctttgctttgcagcttttaaaatttatccaaactaggttgaataaagtggatttgtttagcgcccttcaatgttgggggactagtaagggtttccatttgtccatccaacttctgagagtgctgcattaagacttttgtttcaacaccaccaatgcccactttatttatgatatctcttaataactatttttaaatttctatccattctctctcccttttctctttccttagtctcttggaataagtctgctctctgttgttttagcataacttttccctttggaggtggccctgaactagcagctatggctcaatggctagaattccagcttggcccagcatcaggttctgccccaacactatccctataatttagtgattacagataataacaatcaagagattccatgttcagctttctgacgttgttgttcctttgcatttattttggcctccagtgagccaattctctatgaatgagaccccatgatatctaaattccattggtaaatttacttcaagtaagataagtaaaccctatgactacctgggatttatttcaaggatgcaagactgtttcaatatttcaaattcaatcagtataatctatcatattaacaggtgaaagaaggaaaatcacatgatcatacatcaatcaatgtagaaaaggcatttgacaaaatttgacacccattcataattaaaattctcagaaatataagaatatagaggaacttcctcaactttatgaagaacatctgtagaaaaacctacagctaatggtgaaatactgaatgcttcctccataagatcaaggacaaagctaagaaacttgctctcatcattctcattcaacagtcctagaagttctagatcaataaggcaagaaataataaggctagaaaaggaagtaaacatcatacagatcagaaagtaataagtaaaacgactcctacttgcagatggcatgattgattatgcagaaaatccctaagaatcttgaaaaaagaaaaacacctagtagaatttaagcatctccagaaaatttgcataatacaaaaataaaagaatatacaaaaataaaatgcatttttatatactagccatgaacttgtggacactacaattaaaaatatgatttcatttataatttctgaaagaaatgaaataggtgtaatctaacaaaacatgtacaggacttgcatgttgaaaactgtgcaatgctgatgaaagaaatcaaagatctaaataaactgacatactatgttcatgaattagaagactctgtataataaagatgtcaatttttttccaaactgatatattattttaatgcactgcctattcaaactatagcaatatttttgtaaacatagacaagattactataaaatttatatgtaaaggcaaagaaattaaaatagtgaaaacattttttaaaagcagaataaagtggaagtaatcaatctacctgctttcacgactgattatatagctacagcaatgaaaactgtgtggtactggcggaaaggcagacacatagatcaacaggccccaaaaataaacccacaaaaatacacctaactgatttttgacaaaagtgcaaaagcaatttaatggaggaaagatacccttttcaagaaatgggactgccaggctaggcrtggtggttcatgcctgtaatcccagctctttgggaggccgaggtgggtagatcacctgaggtcaggagttcgagaccagcctggccaacatggtgaaaccccatatctactaaaaataaaaaaattagctgggcatggttgtgagagcctgtaatcccagctactcgggaagccaaggcatgagaaacacttgatcccaggaggtggaggtttcagtgagccaacatcacaccatcgcactccagcctgggcaaaaagagggaaactctgtctcaaaaaaaaaaaaagaaaagaaaagaaaaaaagaaatgggactgccacaactggacgtccatagacaaagaaaaacaaacaaatagaaaaaaaatacctcaaccaaaagtttataccatctgcaaaacttaagaaagggtgatggctaattttgtgtgtcaacttcattgagccatgtggtgccctgatattcagtcaaacattattctgggtgtttctgtgagggtattttggatgagatttatcatttaacctagaagactgagtaaagcagattgtacctcctactgtgggtggacctcatccagtcagttgaaggcctgaatagaacaaaaaggaagatccttcctttcataagagagaattcttcctgtctgatgatctttagactaggacattggctttttcctctgcctttggcttgaactgaaacattagctctcctgggtctctagcttgccaactcgccctgcaaatcttgggattttccagcctctataattgcataagccaatttcttataataaatctctttgcttatgtatacatcctattcattctatttctcaggagtaccctaaataatacagagaggatcatggacttaaatctaaaactataaaatgttaggaaaaacacactttgagagctaggattagataaagacttcctagatttggcaccaaaagcacagtccctaaaagaaaaattgataaattgggcttcatcaaaatttaacattttgactctgcaaaataccctgacaaaaggaaaaaaaggtaacctgcagattgggagaaaatatttgcaaaccacatatctgacaaaggactagtatccaggatatgcaaataattctcaaaactcaacaataaaaaaattgaaaccttcaggtgcaaaggctcatgcctgtaatcccagcactttgagaggcagaggcggtggaccacatgaagtcaggagttcgagaccagcctggccaacatggtgaaaccccatctctactagagatacacaaaaaactagccgggcatggtggtgggtgcctgtaatgccagctcctcaggaggctgaggcaggagaatctgggaggtagaggttgcagtgagctgagaatcacaccattgcactccagcctgggcaacaagagtgaaactccatctcaataataataataataaaaccaattataacatgggaaatttacatgagatatttccatgaggaagacacacagataggaaataaacacatgaagaaatatgtccaacatcatctgccattagagaaatacaaattaaaaccacaatggtctgggtgcagtgcctcacgcttgtaatcccagcactttkggaggccaaggcacgtgaatcacctgaaatcaagagtttgagaccagcctggccaacatggtgaaaacccgtctctactaaaaatacaaaaattagccgggcatggtggcatgcccttgtaatcccagcaactcagaagggtgaggcagaagaatcacttgaacccaggaggcagaggttgcagtgagctgagatcacgccactgcacttcatcctgggtgacagagtgagaccttatctcaaaaaatatatataaaataaaaccacaatgatatatcagtatatgttgataaaaatggctaaaacaaaaaatagtgacaacaccaaatgttggtgaggatgtggagaaactagattactcatacattgctgatgggaatgtaaaaaatggcacagcctttctggaaaacagtctggcagtttgttgaaaaaaagaaaagcaaaaactgagcctgcaactactatgtgacccagcaatcacattcctgggcatttatcccagagaaatgaagacttatgttcacacaaaaacatgtatataaatgtttatagcaacttcatccaaaatagtaaaaaactggaagcaattcagatgtccttcaacaagtgaatggttaaacaaactgtggtacatatgtaccgtggaactcaacaatactcaacagtaccatgctacttgacaataaaaaagaatggatggcagagtacagtggctcatgcctgtaatcccagcactttgggggaccaagtcaggcagataacttgagtccaggagtttgagaccaacctgggcaacatggcaaaacaccgtctctacaaaaatacaaaaattagctggacgtggtggcatgtgcctgtagtcccagctactcaggaggctgaggcatgagaatagcttgaacccaggaggtggaggctgcagggagccaagattgtgccaccgcactccagcctgggcaacagagcaaaaccctgtctcaaaaaaaaaaaaaaaaaaaaaaarggattattgatacacacagcaaccaggatgaattatgctaagggaaaaaagtcaatcccaaaaagttgacaaaaagtcaatcccacagtacatgctatgtgattccatttatctaacattcttgaaatggcaatatcataaataaataacaggctggagtggtggctcacacctgtaatcccaacactttgggaggctgaggcgaacagatcacttgagctcaggagttcaagaccaacctgggcaacgtggtgaaaccctgcttctaccaaaggtacaaaaacttagccaggcatggtgtcctgcatttgtagtcctagctacttggaaggctggaggtgggataattgcttgggggtgggcaggggaatgggaggtagaagttacagtgagctgagattgcaccactgcactccagcctgggtgacagagcaagattatctcaaaaaatttaaattttttttttaaaaaactaacatcattggccgggcacggtggctcacacctgtaattccagcactttgggaggccgaggtggatggatcacctgaggtcaggagttcgagaccagcctgaccatggtgaaaccctgtctctactaaaaatacaaaattagctgggagtggtggtgcatgcctgtgatcccagctacttgggaggctgaggcaggagacttgcttgaacccaggaggcagaggttgtagtgagccaagattgtgccattgcactccagcctgggcaacaaaagtgaaactccatctcaaamaaaacaaaacaaaaaatcaaaaactaacatcatttctaggggttaaggaggaagtggaacaggagggaagtagatgtggctataaaaatgggagcatgtgataataagaatgttctgtatcttgactatatctatgtcaatatcctggttgtgatatagtggtataattttgcaggatgttaccactgggggaaagtgggtacaggggatctctgttttgttccttacaactacatgtgcatctacaattatcttaaagtaacaagtttaataaaaacagagaaaattaaagtgaaagaggacagcaggagagtgggtgggtgagatgcagcaatgcaagaagaggcaggagagatcttaagcacaactaggactcaacccaccattgctgctttgaaagtggaggagggggccacaagccaaggagtgtaggtggcctcgagaaagtgggaacacctctcagctgacagccagcaagaacatgggacctcagtcctacaaccacaaggaattgaattctgctcacaacctgaatgaccaaggaaactaattctccctaggctggagtacagtgatgcaatcataacccaggctggaatgcagtggtgtgattacagctcactgcagcctcaaactcctggtctcaagcaatcctcccacctcagtttcctgagtagctgggactacaggcttgcaacactatstctggctgacgtcctgattttagcccagtgagacctgtactggacttcttactgacagaactgtaagataatgcatctgcattggtttaagccactaactttgtggtaatttgttacaacagtattacgaaactaatacaagttcttcttgcctattcagattcacacataccaaaaacacagaatgcatataacctaaattctggccacaacctactcgccatccatgaaaaccctgcaaaatacaaactcagaagcactatattgggtgactggctctcagcccctcagaacccagctgacaatgcaggttcttcttgatatttttatcatcctggtgatactgtgtcttacagaaagaatttttttggtctctatggcattatacccaaattttcctgtattggtcaacctgatgcagttcatcagcaatgtctttttttctaaaagttcctcactctaccttctgccttgtgagctggtttatttatcaagattgatttcaaatgtgtcagtggctcagtgaggttttcccaagcaacctaagaagagtattttttctctaatccacattttccacattttaattataacatttatcacattgtattataaagtaatcacatgacttataactctttgactcagaagattcttccacagtgccttgctgaattctggacacctaagtaggtgtccaataatttattgttaaattgactgatgatttggtcctcaggaaacttggagttaaataaatgcatgggttatgacaaagcagaaatctaaataactcccttccttccttccttccttccttccttccttccttccttccttccttccttccttccttccttcctccttccccccttccttccttccttccttctgttcattccaggtctttagataataactctttcaaccaattgcctatcagaaaatcttggaatctgcctatgacctcccagtttccagttgttccacctttctggaccaaaccaatgtacatcttacacgtattgattgatgtctcatgtctccctaagatgtataaaccaagctgcagcccaaccaccatgggcatatgttctcaggatctcccggggctgtgtcatgggccattgttcactcatatttggctcagtataaatctcttcaaatgttttagaatttgactcttttggttgacatgaaaaagttgaaagcaggaaataaacaataagaaccattaagctaatttctaatcttatctgataattttttttaaatattttttgtatcttgttgaaaccattaaaaagatattttggattaccttagaatagcaatattggcattcttactcttcttacattcttaaaaatgaacaaaatatagaaaattaaattaaaaacacttttttttgagatggagtctctatctgtcacccaggctagggtgtggcatgatctcagctcactgtaacctccgcctcctgggttcaagcgactctcctgcctcagcctcccgagtagctgggattacaagcatgtgcccccatgcctggctaatttttgtatttttagtagagatgggtttcatatgttggccaggctggtcttgaactcctgacctcagcggatctgcctgcctcagtttcccaaagtgctaggattacaggcgtgagccattgtgcccggcctgaaagatacatagtttcttttttttcttcttcttctttttttttgagacagagttttgctcttgtcacccagtctggagtgcaatggcacaatcttggctcgctgcaacctctgcctcctgggttcaagtgattctcctgcctcagcctcctgaatagctgggattacaggcacctgccaccatgcctgggtaatttttgtgtttttagtagagatgaggttgcaccatgttggccaggctggtctcgaactcctgacctcaggtgatctgcctgccttggccttctaaagtgctgggattacaggtgtgagccaccgtgctcgacttgaaaggtaagtaatttcttttgaaaggaactggcacaatcctgatacagaggtattatgagagaaaaaaaaaaaaagaggggaaagagcggtgaagagcagaaagactcctcaatagatttacactcagggaaaaaacaaaacaaaacaaaaaatcttttatttggatacttaaatatttcaccatgatttaaaacatttggtgaagcagttattttatgaaggaagactacaaatgcaaggactcagggaagaatgatgaaacaacaagaggagataaaagttacactggcagaaatcaggaaagaagtaaaagtaaaaatcatcacagatatgaaaatgaaagtgaacgcaggaggagaatagagtgaaaaacacagtaaggaacagaaaggaaataatgagtaaagcaaacaaaatgaaatgaaaacaaagaatttaaaagacagaaaaaaagataagaaaacagacaaaggatgtgagtcgacatatgtagaataggaatacctgaagaaaaaaaacaagacattagaaatatttttaaaaatttcaaatacactttcctaaaatactaaagcatttgaacatttatatgtgtgtgtacacacatacacataaatagatagatagataggtagatagatatgatattttacaccagggaaaactgactgaaaataatcaacattgagtcattctctagtaagtattggattttaaaagagtgaagactttggtcagttagacaaaatcatcaggtcagttgtcttaaaaagagatcaggctagtttcaggtttctccagagtgacattcaacatgagagaacgatgcaacatctgtcagatcctcaaggaaggaatgttgtgtcaaggtttcacgttcagcgaatctgtatttcacccataaaagtttcagacaaataattttgaacatctaataaccaaggaaatctttttcccataagcagttcttgaggaaattattaagactacaggatgactcagccagccaatagctgactgggaaaagcatagtaaaagagcaatcttttgaaaattgaatctatttaacagtacaccaaagcctaaagcaaatgtgagatgtagggtaaagaataatatgtatgtacatgttatatgcaaaaataatacaaagggcaaattttgggagaggaaggagaaaaacgtgaaagatgtgtgggaagcactgaagatcagttagtcattgattctttttttttcttttcttttttttttttttgagacggagtctcactgtgtcgccctggctggagtgcagtagcacgatctccgctcactgcaacctccacctcccgggttcaagtgattctcatgctttagcctcccgagtagctgggattacaggctcccaccacctcactcggctaatttttatacttttagtagagacgggatttcaccatgttggctgggatggtctcaaactcctgacctcaagtgatccgcccgcctcagcctcccaaagtgctgggattacaggcttgaaccaccacgcccggcagttagtcatagattctatcactagatattttttaaactgcagaaacgattctttatccttcagtgttatttatttagacatgtttgcttcatgtagtgtttaagtgcatgtgtgggttttttttccccgaaccatttcaaagtaatttatagacatcatggcacttcctctgcatccctgtatgagcacacttaagcatatgtcttytaaagtgaagggtacaatgcacactaacattacctacaataccattatcgcacctaaggcaataacaattccataatattacctacmatccagcccatattcatatttcttcaattgccccccatttttttttctagatgggatttcaccatgttgggcaggctggtcttgaactcctagcctcaagtgatccacctgccctgaccactcaaaatgctgggattgcgggcgtgagccactgtgtccagcccmaattgtcttttatagcttttttttttttccaaactaggatccaagcaaggttcatatattgcattgagttatacatctccaactttttttaatctagaagaatagaagaatcttccaacctttttagaaaaatgacattaacttttttgaagagactgggtcagttgtcttgtagaagaccctgcattctcttctgactgattgatttcttgtggtgttatttctctctccagtgaattttctgtaacctggcattaggtctatggctcaattagattcagactacacatttttttataagaatactttgtaagtggttttcatgttgcatcctaccaggtggcacatgatgtctggttgccattgttagtgatactcaatttgatttccttggcaaggtggtgacagccatagctctccattgtaaagccagtgttctccttggcggtgagcaagtaatctgagaggacacttctgaatgtgggtgggtcatcaccaacagttcctccctttcctatctgcatatgctggtcctcccatgaagaagtagaatttatttttcatgccgtaaatcttgactggtcttctaacttgtttatttcttggtctgggccttaagaggcattgaagyttccgggattgggagtaagctgccatggaaagaaactcaggctggactactgcatgatgagagatcacatcaaagagaacagtccagccagcccaacttgagacaccagacatgtgatggagccatcttggattcctcaccccagccaacaccatgtggagcagaggcaaaccctctccatggagttctgcctgaattgcagacttgtgaataataataaatggccattttaagccgttaagattttgagtggtttattatacactcataggccatgtaaatatcatctcactcaataattttaacatccatcaatgatctttgcctgaatcatttcatcgggcttggcaaagggtattttaaattctgctgttcccttcacatttattagctggcattcttctggagagaaagagagagagagagagctttccctcatcatctaggtatcaactgctattcctcttaaagaggaagagcaaatgttcaatgtctcccataattcctagctttcagactaagaagttgtgtgatattcaccaccagtggtggcaaatgaggctctccccctccactttttcccctagtctttagctgttcctcttcaatggctgtgcggtgcgctttgcacatctgtccttgatctcaaagtgttgcactataatcattgattcacttgactgtccttttaactggactgtaagtttcttgagggcagggacattataggctcaaggccagtatatataaagttctgacatctggatagatggtactagatttctaccatacttcttttagttttattttggacatacattttacatagcttagataatacttacaattttttaaatcctgcaattatttttttagaggtgatcttgatactttagtttttattttattttactttatttcatctttattttttgagacagagcctcaccctgtcacccaggctagagtgcaatggcaccatctcagctcactgcagcctccgcctcctgggttctagctattctcctgcctcagcctcctgagtagctgggattacaggtgcctgccaccacacctggccaatttttttgtatctttagtagagatggggtttcaccatgttggccaggctgatctcgaactcctgacctcgtgatctgcccgcctcggcctcccaaagtgttaggattacaggcgtgagccacgtgcctggcccatttgattttttaatcaaaagaatagctgtgtgtggacaaaaaaataacagtacagtgggctaagatctaacttcacagttccctaccctcaaaccctcctcagccctgattccactccccaggggcaatgacttccagtctttttttaggtttgattcctgtggatgattttattttccaaaagtggccacaacaacatctgccaactcaaccgctcctcttacaatgtcaccttgacattccttccagggatgggggaatccatgtcccctcccctcaaaattgggttggcttctgtgaatattgtgatccatggaatatggcaggagagacactatgtgacttcagaggctagattgctaaaggtggtacagcttccattttggtccctggaatacttgctcctgaagttgcagtcatcagtcaccatgtcagcagtcagactgccccgtggcagccatgctgtgtggaagcccaaacatcctacgcagagcagccacttggagcaaccccaggtctccatgaagagggctatccagccagcgcccagttgcatcagctgtccagcagctgtgggactgcacctgtgcagagctctcctagccagaagcacctggccaagcccttcctgaattcctgacccacaggaaccaagagaaaataattgaaaccatgaagtttggggatgacttctaaagcagcaattccaaacaaataatttttctgagttacctccctgtctgcttatcgtactacatctcaatttactgaccttatacatgattgcttcctactttgagagatgagactttagctcacttgcattaacccctcacttgtcccttccaattttttaatggtttagaattttatcacctacctttgaaactgtttttaaacctccatttcttgctccaccaacttttggaatctcatattactatccatttgtaagattaagtttatataatgtctattctttcttctacatctatttcaattctcaacttaccttagatatatcttcattattttcttaattgtgaaataccaggccagtggaagaacatgtaaagtatgtattcactgttattctctaaaattcatttattttctatactgtccatcctgcagagttaaacggggccctggtaggtaagaccatacctacacttctcatattcgggatggtggcagtatttctgtgatttcctctagtgttgtaacaattgtttattatttactgtttctgtaagaggggaaagttccagggggttctcctagacccttctttttacattaaccttcaccccacatgtcagagaactgctctggtgactgatcattcccggagatattcattcagcttaaccaatgcacactttggttaaaactccacctcatttatcactaaacccccataagtaccctcttgaccagtggaccatgtgactttctgattctccagttaagattattagctcagagccagtgtcccacagtcctctaaagtcttcatatttctgtttcactatttcctagcagctttggtaagtagcctcccatcccttcggggaaggccgaaaggaaggtacttgtggtattattgcaggatccttcctcaacaataccaagcttatgcttgtttcaagtggtacaaaatcaatgctgtgcttcatgctttgcctattatcatgatggttctggtcaggtatccaccagacttgggttttggttaggctaatgaagtagccccttagtgagctgaacaggcatttgtttttgttgcagggatcccatcgctcatgaattgttgcttaagactctgtgggaaagacctttctgatgatcacactagcctgacatggtaccaaagtccatttggcttgtgctagccccggtgccactgctgggcttctgcaacccaagtggattgctttctggccccagtgcaatcagatgacaagaaaagcacattagaaagcatttcttcagctgggcgcggtggctcacgcctgtgatcccagcactttgggaggccgaggcaggtggatcacttgcagcctggccaacatggtgaaaccctgtctcaactaaaaataccaaaaaattagctgggtgtggtggcgggtgcctgtaatcccagctactcgggaggctgaggcaggagactcgcttgaaccctggaggtggaggttgcagttagctgagatggcaccactgcactccagcctgggtgacaagagcgagacttcacctcaaaaaataaaataaaataaaaagtaagaaagcattctttccacctaccaaagcttggattaaggaaccagattctagttctctaggaacactgtggctttgtggataggtcttatgtggtaaatccactaaagctttattttctaaagttgttagctttttttcttttacattatatgttactggagttcagagagggtccactgtcaagttcagtttcttcaagcagtcaggcaaacaatgaaagtcactctcagtggctcaaaccaaaaactgaatatagaatttctgttgactgaacccatagtgataaatccaatcatatctgaaacttgattcctctgctttttgatcatcagcataacccactgtcacatatgttccagatagttgctgatattcagaatcctccaaattttcacaaatatacacattctaatactacagggcctgctgttttcctactaaattttcttcctttcacatacaaaatgtggtgaatctgtgaattcaactgattgccagcaacctgcaagatcaaatactgagtttggcttttgattacttaggcactggctgtaagaaattattttaggacagtcatagaagatccctggttttccttctctgccctgaccagccgtttgaagttctcatgctctgtattttgttctacagcagctgccaagtggctctccaatgtcttgtcctcactgggcacttcattccgtgtgaccataggtaataatatagtcagctatctcactaggagctaccagagtcccatccagttagatgctggtgatgctgctatgattctattttaaatgtcctgccatctctgttacttgttcaagactgaaggacctgagtggcagcacctgatatgccaaggttacataaagggcccaggtactggctaccaagtgatgaagaaaaataggatctccccactttggttcctgtgttgggaggccggaaggcatttggatgaatagtgcctctccagagtacatctgtttgatgactgtctgactgtcctggtcttctctttttaatacatttcctgttatttcttgagttctagagggagaggagtcctaattcctgtgatttgctgtcaaccaaattcttccttaaaattccctttttttttgagatggagtctcgccctgtcacccaggctgtagtgcaatggcatgatctcagctcactgcaacctctgcctcccaggtacaaatgattctgcctcagcctcctgagtagctgggattacaggcgccagccaccacaccaagctatttttttttgtatttttattagagacagggtttcaacatgttggccaggttggtcttgaacccctgacctcaggtgatccgcctgcctcggcctcccaaagtgctgggattacaggcctgagccactgcgcccagccccttaaaacttcattttgagaaattaaaaataaagataaaatataaagaaaagaataaaagtgtccatatttctattcaccagaatttagtcacttaatttcttgaggtattttcagtcctaattttctttttagaagaacactggggggtggggggcagaaattatacatgctgattgttcaaatttaggaagaatacaaagtaagtttcactcactcaacaaacacttgttgaacacccatcaggcaccagcactcttctagacactggagatacagcagaggacaaaacagacaagaaactctgatttcatagcatacctgttagtgggagaaatcacgtaaggaaaatagtaaattatatcgtatgttagatgacaagcactatggggaaaaatacagccagggatggggataaggagcatcaggagggtttgtcattttcagtaggatggccaaggaaggtttcactgaaaaagagacatcggaatagacctgaaggggatacaagaagtaaagtaagttaaaaaaaaaaaaaatcaatctaataacatcatgagcattatgtggaagtcattccagatgtctgtgtgaacatgcagatttctggatgaatgattatggatggatggacagaaaaatctacttaggagacactatcataaaaacaaactagaaaagatttttaagaatcagtaaattatttagtgcctatttctggatatctatgtatctggatataaatgcacagcgtaaagcatatgagttttcacacacacacacacacacacacacacacacacacacacaccctttgtatcaaccacccagatccagatttggaattgcattaaatctataaattgatttggttaaattgactttgtttttttaagtcatctatctcataaacagggtcgatccctcctcttatttaggtcttccttagtgtcttttggtaacgttccatggttttctacaagtcagtctcaccaatctttgagcagatttattttgaggcatttgatgctctctgatactattgtaattagtattttcctttttttttttttttttttgagacagggtctcgttccctcacccaggctggagtgcagtggtgtggtaatagctcactgcagcctcgaactcctgggctcaagtgatcctcccacttcaattccccaatagttgggactataggcacacaccactctcataatttcaatttctaattgttgctaagataattttgactttgtatcctgcaaccttgttaaattcacattatttctacg

SEQ ID NO: 96745 - DNA, 24127 bp, Homo sapiens
tacccctcaaagacagcctgaaccacctcaacctgcccccactgctggtgctgcccacacggtggtccccgaccttgggcccagaccggcacggggctccggaaaaactgcttggggctgagcggatgccccgagccccgggcggctttgagtgcttccactgccacaaaccctaccacacgctggccgggctggccaggcaccggcagctgcactgccacctgcaggtggggcgtgtcttcacctgcaagtactgcgacaaggagtacaccagcctgggtgccctcaagatgcacatccgcactcacacgctgccctgcacctgcaagatctgtggcaaggccttctccaggccctggttactgcagggccatgtccgcacccacacaggtaggacagggtgaaggtctgcaaggacggtctgggctgggggaagagggtgggctgcgggagttagaaaaggaggaggggtgattttataaacaatagcatgggcattcacattcagcttctgccttttgacttatctgtacaaagtcccacagaccacagactagaggccagaagtccaaaatccaggtgtcagcaggggccagtgcaggagccacgcctgtaatcccagcactttgggagattgaggtgggaggatcacttcaagccaggggttcaggaccagcctggccaacaagcaagaccccagtctctactaaaaatccaaacagctgagtgtggtggcacgtgctggtaggcccagctacttaggaggctgaggcaggaggatcacttgagcccaggaggttgaggctgcagtgagctgtggtcatgccactgcactccagcctgagcaacagagtgagaccccaactcaaaacaaaaaaacaaaacaaaacaaaaaaacccaccaggcatggaggctcacgcctataatcccagcattttaggaggcagaggtgggtggatcacctgaggtcatgagtttgagaccagcctggccaacatatgaaactctgtctctgctaaaaatacaaaaattagccggacgtggcagtgcacacctgtaatcccagctattcaggagactgaggcaggagaatcatttgaacccaggaggtggaggttgcggtgagccaagattgcgccactgccctccagcctggtgacagagcgagactctgtctcaaaaaaaaaaaaaaaaaaaaaaaaaaaaatcaaaaacataatgccattaaagtacaaaagtggcctgcccttcccaagagccggccagcagcctctgcccgggctttctgtcaacctcagcgtgcaaagaataaaaacagaaaggaagaaagggcgccaggaataagcttcagtctccacatcaggcccaaaggttcacacttttttttttttttttttggtctgaggcagggtctcactctattgctcaggctggagtgcagtggtttgattgcagctcactgcagctttgactgcctgggttcaagtgattctcctgcctcagcctcctgagtagctgggtccacagacatgcatcaccatgcccagccaatttttaaattatttgtagaaacgggggtctcgctatgttgcccaggctggtcttgaacttctgggctcaatccattttctcaccttggcctcccaaagtgctgggattacaggcatgagccactgtgcccagctagttcacactttttctttttttcttttttttttttttttttttgagacagagtctcactcttttgcccaggccggaccatagtggctctatgtcagctcactgcaagccccgcctcctgggttcatgccattctcctgcctcagcctcccgagtagccgggactacagacacctgccaccacgcccagctgattttttgtgtttttagtagagatggggtttcaccatgttagccaggatggtctcgatctcctgacctcgtgatccacccgcctcggcctcccaaagtgctgggattacaggtgtgagccactgcgcccggcctgctagttcatactttttctaactggaggttccctaccccctaagtcatgacttttgtgactgggaccctctgagtcacacctgggtgcaggccagagggaaggccttttccaggtctctgggaaatcctttctggtttttctcaactctttgatgacgacaccccccacacaccccctttccgtgccaaagggccctggggcttggtgccctcagcctgggagtgaggagtgtggggaggccctgcgggaggctggcctggccaggagcatgcccagtgtcccaccagcaggaatgcaggtgctctgggcccctcaggggctgcaggctgaggtctctcaggactctatggggctacaggaatgaacaaacgattcccagtcacacttccctttacaggtgttgggccaaggtcccagcaggactttgtccagatcccctgttgtcctgatgggaggtggttcctaaattctgcctcctcaaggtccacagctctgcccctgccctggattctgctggagctggccagacccccccacttgcctgtgagtggccagaaacagctgccagaggcccccagtgcttctcccgtcctctcccagtggccaagggccccgggagggctactgcagcaacactaggagatctagcacctgtggctgcctgtgctcctgggaggggcttcaggtgatgtggcgtgccaccccgtccccacacagctcaaccttgggtgctctggctgtgagcatttgtggggaagggatgggagtatccattgatgggcagggtgggtgctttagccttcactccatcttccatggtgtcactggccgccgccttcctcccacaggggagaagccctatgcctgctcgcactgcagcagggcctttgccgaccgctccaaccttcgggcccatctgcaaacgcactcagacgccaagaagtaccggtgccggcgctgcaccaagaccttctcccgcatgtccctcctggcgcggcatgaggagtctggctgctgcccgggcccctgagaggcacgtggtcggcgcaggtaggagggatggtcctcaccgggagagctggcgtccctcctgcccccagaggagccaggagtctgggagggcggggccgggcctcacacttggtgcgtcctccacatctgcgtccaatcagaaccaaagaagtccagcggggggccactgggccggaggacactcccccaggcatcccaccgcgcggagcccactcagaggagactcctctcccggggaaggctttcatcagaacaagagccatggttccatttcgacacggccaggtctccggggctacccttccaagagtcagagcctcggggaggtggccgccagcatgggccggcactgccgccggatggctggcaaggctgcctagttcccttgcagcagaaatgaacagttctgacttatagtgagcacggccctgtggcccttcctcagtaggcacaactacctctcagccagcccccgccagcctttggtttggggtctgggacgagctgccccatgtcacacgtctatgtgcatgtgcacacacactcaaacatgtacacacacgtgccctccccacctcactagactctccgggagatggggcaggactgggagagcccacgattggtgatttgggtgtgttgggatgaggcggagtgcctgtgggatttgtcccggtcagagcctcagggggctggggtctcagggcactcagcttcccaggcaataacagccgtggggtaataaatggtctctgcacacctgcatgttccgttcttcgaagctttgagtcttggccaatcccctggttctgtggaggaggtgggactctgagaaactccctgagacagcaggatttggggatcgcctggggcctttagccaccaagtaggcaggagactctgggtcagggcctgccactgtgaaaaactcttctgagaggtggggacactgccagtgggtgagcaggggcgccactgtgggaagaagccagcgcaggagtgggagagtgtcccatggcacagaggaatggccaagaggctccagctggtgccgggtagagggccaagaccaaggccggggcaggcgttgtgcagctgggggcagcgagtcctccctgctgcctggtcagaacagaggactcagggctcctgctgcagccctcaagcgctgcgagggtctgacatgatcactgctgtcttgcagagggtctgggcctctgtccacccatggtacctggggcatccgtgaactggaatcccagacccttgccctgccctgttgagacactgtgccaaatcgacatggttgcctacactcaagacccccctccctggagtcctgctcccaccatccagtggggtggtggcgtttccttcttacacgtggcctcttctcaccgccgagctgttgggcggccgcccactgggctggtcctcctcttcccagcatgtctcagcctctccagctcaaccccaggggcagcgtccaggaaggagcaaggaggcccctcctagtccctgacaccttcgctgatggggatggtggaagggaggtttctgggagcggacacctgtccctcaggagggctgggccgctgtcagctgccctgcttctggctgcagacaggaagacatcattgtcctggtcctggaatggagccacgtggagagcggcaagcgctccccttgctcccagagcccactgagcctcccgtccatccgtctgtccatgagactattcaggggggctcacagggaccacacatgaagcaccttgttgctcagccacttggctgctccagtcccaacccgggcagtgggagccccactcggggcagccccgcctgcagatcagcctggctaacacctgccaggtgctgacgggcccttgggcagatggcttgacgacacctgtttgaagagccttggggacatcccagaggaagcttgacctagaccttgggctccgctggatcaagggtgaccttgagtaaaccggctccccagaagagcttgggctccagccgctaccagtctccacgtgagctggcgaagtgaagacactgagaaagcctctctcaccttcctggaccgggaccactgcctcccctacagggattggccgtccccagagagggaggcacccactcagctgccataacaaaggaccccagcctgagtggccgaaacaacagagtttcattctcccccagtcctggaggctggaagtcccagatccaggtgaaggcagggctggttccttcagaggctgtgagggcggggctgttccaggctttcttgtggctttgggagtcccgtggcatctccctgtgtgtgtctgtttctgtctctcctcttcttatgaggatacagtcatgttgccctgctccaggaggcccccatcttaactcatgacatctgcaaagcctctacttccaaatatggtcacaagcggagggcccgaaaattaggacttcaacatacggaagcggggggacgcaattccacctaaacagccagtggaaacatggggctttgccaagagttgccttgagggtccttgcactcagcgctgaggagaggggaggcctcaccctcttcttttgtccctcagtctacaaaggatcatgagggccaggcatgggagttcactcctgtaatcccagccctgtgggaggccaaggcgggtggatcacttgagcccaggagtttgagaccagcctgggcaacatggcaaaactctgtctctactaaaaatacaaaagaatgagctgggtatggtggcacacccctgtagtctgagctatccaggaggctgaggcaggaggattgcttgtgcccaggaggtggaggttgcagtgagccaagatcacaccactgcactcagcctgggcgacagaccgagaccctgtgtgaaaacaaaaaaacacacacaaaggatcatgggggacagctgatcttaaccgatggggtttactggaagcatctctttcaaaggttgcatccaagtcaccttccccaatggccatagctgttccctgacccatctcctctccctcatccccatcggggcaaaggcaggggacaggccagcacccgggtcttgaggaggagtagggctaggagcctgtcctccagggccccctccctcccgactgtctcccggagctcttgcctcctctgcttcacggtcaggctgccaggggtgagggtctccaccggcctggaaaaaggcaagagctccaaccacggtttctattaagtctcggcatctcacaggagggctttttttgtttgtttgtttgtttggtagcatccagatccctaaaggaagctatattgtaaattgtsttctatttctgggtcccaatatctaaatgaggcgattgcacctgttgggaatgaaggacaggaatttcacaagccgaaaataaagctgaatgttttcccttctgtctcagcccatggaaaatgctcttatatttatatctgggcgggcaggggctgggagggagaggatgggttggcagagagaggggcagaggaaaggcagggcacctgccaggggcctggggtgtaaagaatggaggagccactccacttaacgcaggtctggcccaagtcagaggcagcgagggtggccagccccacccaggacacccccagccactgcccaccagccctgcccttcactgctggcctctcctccttgttctgcctgaccatccccaggttaacctggagcggtcatttaaaatctgggcttctggaggcctatccaacacctgcagcttgagcaccaggaaggaggcgtctcagccttgctcacagtctccgggggctcggggcggggagagctcttcctcccaggactcaggccttcctttccccacccaaatcttcactcatcacatccactctcctccctcttccaggggcagtgtcagagtctttcctccgggcgggaggcggggcaaggatggacaggaggctgcaggacctgagcacactggaagcgggtgtttcagtgacggtccagtgatgtctgggtgagggtggaagcctaggaaatccctgaggatcctggacaagaggaagagggtgtcctgagctctgaaaggcaggggctgcaccctcctcacagcagaaaaagtcccctgatgacgtcttccctaatagcacacggcaggcctcagacaggacccacaccagggtgtgcaggaaggaaaattagtagggccctgcgtgcctctcgctgttctctgactcatagtgtaaaagcaaagaagacgcctggcctcctggaaacaggtgttgagggacagcgggcctctgggtgaccgggtccctctctccactccccgttgatagaaacttatcccgaacgccaaaaggcgctaaggttattgccttcatgtccaagggcccagagcatcctataaatatcattttggcccagaataatcatgggggttctctaggtgtttgaaaatagcctgcttgctactatctatattcagagaacccactcctggcctccactcgcgtggctaagtatagctccctggcagagttcaatggaacaaaagcttccaggcgtacacgacctcrcggatggcagaacattctcggaggagcacctcagctgccacgactcagaggagctcagagagaggctggcactgacctggtcacctcccatctcccagtcttgagccgggtaaatctgtggacctctcagcaaacaagaggcattcttgccagacccagragcaaggggctctgatgctagttttgtccttcttgaggggttgagttagtcacaaagccttggtttcttcatctgtaaaagagggattgtgcgaamttctatgtcrgaattaaagagaactccaagtaagccatagaaaaaccaaaggctggccgggcgcagtggctcacgcctgtaatcccagcattttgggaggttgaggtggatagatcatctgaggccaggagttcgagaccagcctggccaacatggtgaaaccctgtttctactacaaatacaaaaattagccaggcgtggtggtgtgcgcctgcaaccccagctgctcaggaggctgaggcaggaggatcacttgaacctgggaatcggaggttgcagtgagctgagatcgccccactgcactccagcctgagtgacagagcgagaccctgccttaaaaaacaaaaagaaaagaaaagaaaaaaaaaaaaccaaagacatttaggacacccaaaataaaactgccaacctaaggaacactctcagctttgactcctcttaggatctctatttctggacgccaggttctagttgcagcgagtctgtcttcacagccacccctggcccggcccacggcaatgcctgagagcagctcagcacctgccccggggttgggtagagctgtatcatgcgaatgggtaaaggcggcagagtttcagacccagggcccagcctaacggtagatagacgcctcccatcttgccaggggtcatgcgccatctctgggaatcccaaggaaatgcagggccaccttcccacaggatgtcaatcagcactgccaccccagctccttcccagaaacccccacctcaacgccaaatctgggaatcttaaagcagccccttctcttcagcagctcccctgcttctccctcccctcccctcccctcccctgtgcttgttctctgagtgagggtgagcctgtgatacatccgcaggaagacgcagatcactgcagtgttgcttatccagccccaaataccagctcctttttgcttcccctgggaacaggcagcggggaggcccaggaaacttcagaaatgaagctgagaggcgagagaaggtgggcagtgagatcacagggcrcttctcatccgcacaaggcccttgtgaaactcaactgttttgcattggcaaaaagaggggctgagatggagacacagcccagccagcgggtcctggtcccgttgccgtcccatccaccaagcatcatttctgcggtgccgtgacagggtgtgcccccccaccgcaccccagctgggctctgcccagcatggtggggtctccctcgtctcagaacaagttgttcttacaggtggtctgcagaccccttgagaccctctaagtggcttctgctgggcagagctgctctcctgtttggcacacgcacccatggtgcaaaagcagccatagccacgtgagtgctggcacattccccacacaccagaaaacaatcacagctccgggatggccctcgtggtcacagctcagccctggttctggcacatcccccacataccagaaaacaatcacagtttcgggatggccctcatggtcacggctcagccctgggtccacggcagctcgtcgggatagccctcatggtcacagctcagccctgggtccatggcggctcgtcgggatggccctcgtggtcacagctcagccctgggtccacgccggctcgtgtagaggkagcgatggcagtgcacgcagccccgcacacaccgaggtccactctccgcacagcccaygctcacacggaggaaagatggcagcactgtgagaacacggacctgggtcttggcaggmatgaggtgagccggccacttcaagaggaacaacagacagaacttactgccaatggtaaaacwtacacagtctaatgaaaaagaaaatttggaaactttcaccttccactaaaagcctaacagcttcccatgcttactttctgaggggaaagtgatttcctgatactgtaaaatgaagcaggtcaacatctggaagcyccgtgtaaggcagtgaaccaaaagcaaggctgtccgaatgaccgatgtagatgttaggaacccctgcctgggtcaaaggccaaagtgagacagaccagtagattccatggataccaggaggaaactcttactgacgggtgggcctcagattccatcttgcagctcaccttgaagaaagcccactgctggagttttggtgcagcacccaagaacagccaccctgatctgaagaggccaggaaagcatgttgcccctgcagttgtggagagcacagattctctccaaatgcatcaaccaaacgacataacgcagaggcacccaggagggtccagctatccacatctgccacaccagacctgaaaaagatttagacaaacttttctgtttttgcttttttgagacagggtctttctctgtcacccaggctggagtgcagtggcacaatcttggctcactgcatccttgacctcccaggcycaagggatcctcccacagcctcccaagtagctgacactacaggtgcacgccaccaggcccagctaatattttgcatttttcgtagatactgggtctcatcttgttgcccaggctggtctcaaactcctgagctcaaggattctgctggcctcggcctcccaaaatacaaggattacaggtgtgagctacaccgtgcccctagtctaattttattttcttcttcttcttgagacaggatcaggctctgttgctcgggctgccgtgcagtggtgcaatcagggctcactgaagcctcaacctcctaggctcaagcaatcctcctgcttcagcctcgtgagtagctgggtgtgtgccacatgcctggctaactttttatagagacagggtctcgcaatattgtccagcctggtcttgaactcctgaattcaagtaatcctcctgccttggcctccgcaagtgctgggatcacagatgtgtgcccctgtccctggctgatactaattttttttttttttttgagacggagtcttgctctgtcgcccaggctggagtgcagtggtgcgatcccagttcactgcaacctccgactcctgggtttaagcgatcctcctgcctcagcctcccaagtatctaggactacaggcacccaccaccatgcccagctaatttttgtatttttagtagagatggggtttcaccatgttggccaggctggtctcgaactcctgacctcgtgatccgcccgcctcagcctcccaaagtactgggattacaggcatgagccaccgcacgcacccagctgatactaatttctaatgagggtaaatacagatttgtttctcttctctggaaagggatctgcttgtttggcaaaaaaatttaatcccactagtcccaggaggcttgggcaatcccgcctctctgtccacccaggcatcatgaatcaagccccagatattcccacccaggagcaccatggtgcgggaaagcgagctggaaaactgtgaggtggatgcttgtgtccstgaagggaaatactttccgaggtgagtggctcgaacacaaggacggcagggctatttgagccaccagcccagctggccaggtttccggccacgtgcatgctttgcagcttttggtttggaaaactggaagctacagaagaagctgtatttactcactgatttaaccaaatgcacactgtttcttctgaaagatgaccacactcacccaagagcttctctgtgggtcaataataatactccctgcagataaacatgggtgggccccttcagagggctgtatcatctacaagaaaccatccttatccccacaggtgaggaaacgggcacagagaggttaagtagcttgcctgaagtcacacagtgaatcagtagcagagctgttctttaaactcgggcaatttagacccagagtttgtaattttatttatttatttatttatttatttatttatttatttatttatttatgatggagtctcattctgttgcccatgctggagtgcggtggtgcgatctcagttcactgcaacctccaccccccaggttcaagcgattctcctgcctcagtctcccaagtagctgggactacaggcacgcaccaccatacccggctaatttttgtatttttagtagagacggggttttgccatgttggccaggctggtctcgaactcctgacttcaagtgatccacacgtctcggcctccaaaagtgctaggattacaggcatgagccactgcacccagccagagtctgtcatttttgtctctaatttatattgtcactcggtaagaaattctgagatttcctttcacttctttttttttgttttgtgagacagagtcttgctctcttgcccaggctggagtgtggtggtgcgatcttggcttactgcaacctctacctctcggttcaagcgattctcctgcctcagcctcccaagtagctgggactacaggtgcatgtcaccacacccagctgatttttgtattttttagtagagaggggggtttcaccatgttggccaggctggtcttgaactcctgacctcaagtgatccgcccgcctcggcctcccaaagtgctgagattacaggcgtgagccaccgtgaccggcccctttgactttgaaggcagagtagggtatctgatcaggaccgcaaatatggtgctgctttttatagtggggccagtgtgtggggtgatatggtgggaggagctgcaggaagacagcggattgagatctggactcaagcagtcctgtggggaagccaggtttctctactgactcttgtgtagaggagaagactaggcgtggtggctcatgcctgtaatcccagcactttgggaggccgaggygggaggatcacttgagcccaggagtttaagacaagcctgggcaacatagcaagaccctgtttctacaaaaaaacaaaaaaattaaaaaattggttgggtgtggtggctaagtctgtaatcgcagtacttcaggaggccaaggcaggaggagtgcttgagcataggaggccaagtctgcagtgagccgtgaccttgccagtgcattcagtctgggcaacagagtgagaccctgtctcaaaacaaacaaatgaaaaataaaaagtaagtatctaacgcaggaataggaaatcaaatactgcatcttctcacttataagtgggagctaaatgataagaatttatgaacacaaggaaataacagacacgggggtccacttgaggggggagggcaggaggagggagaggagcagaaaagatggggggagggcaggaggagggagaggagcagaaaagatggggggagggcaggaggagggagaggagcagaaaagatggggggagggcaggaggagggagaggagcagaaaagatggggggagggcaggaggagggagaggagcakaaaagataactattgggtactgggcttagtacctgagtgatgaaataatctttacaacaaactcccgtgacatgtgtttatttatgtaacaaaccttcacatgtacccccaaacctaaaataaaagttaaaaaaaagtatcaaattgttaactcytctggaataaacatttccttgtctttttttaatttaaattattatttttaaaatgcccatattccctgagtcctcgcttctttttacctctccaatcgcctggcttcatggtgtttcacatttgctgactgcttccagaaaaacattcccactgaaggcctcccaaygcaaggcagatatagagcaagctagacacatgccttcctttccagttgctttctgactttttaaagtcccagatgcctgggcttggggaaaggacaggaagcgccaggacgcaggaagccccggggatcagcagtaggatgctgtgcaggctgtgctcggggcccctctgctggcctgtccaggccaaacccccagggctgcaggcctggaaccaggcaggacatgctcagccctggctgggcttcccctccttgccccaacaccagtcagggcccacccacgggctccagctgtctggcttcccattcatctcccagaccctctcccctcatgaatcagtgccacacacagcctacccataccatactcagcaaagcacccatgcctgtggctcaggtgcggtggtgtgatcagagctcactgaagctttgaactcctgggctcaagcgatcatcctgctttagcctctctagtagctgggagtacaggtgtgcaccactacggccagctaattttgaaaaaatttttttgtaggctggatgcggtggctcatgtctgtaatcccagcactttgggaggcctaggcgggtggatcacgaggtcaggagatcgagaccatgaccatcctggctaacatggtgaaaccccgtctctactaaaamtacaaaaaaattagctgggtgtggtggtacacacctggagtcccaactacttgggaggctgaggcaggagaatcacttgagcctgggaggcggaggttgcagtgagcctgggaggcggacgttgcagtgagcctgggaggcggaggttgcagtgagccgagattgcaccactgcactccagcctgggcaatggaacaagactgtgtcttaaaaaaaaaaaaaaaaaaattttttttttgtggatatggtggagtctcgctatgttgcccagactggtcttgaactccaggcctcaagcagtcctcccaaatcccaaagtgctgctgggcttacaggcatggaccaccatgcttggcctattttcgacacacatacaggctgaggttcaggagagctgggctacaggcgtcagggtggggatcgatgtgtgacatctttcagggaggtagtttatcctagttctccactcaataagggagtctgcccacaagcacactgtcggcacccattgctacatggctcaactgtgagtataacttagataattgtaataatgaaaataaggaatgctgatggagggataggataagaaggtatgtgactgggagatggaagagaattccttatttctattgagtcataatcaatagaggttatctaaaacttaaaaaaatagggccaggcacagtggctcacgcctgcaatcgcagcactttgggaggctgaggcgggcggatcacamggtcaggagatcgagaccatcctggctaacacagtgaaaccccgtctctactaaaaataacaaaaaaaagtagccggtcgtggtggtgggcgcctgtagtcccagctacttgggaggctgaggcaggagaatggcgtgaacgtgggaggcggaggttgcagtgagccgagatcacgccactgcactccagcctgggtgacagaccgagactctgtctcaaaaaaaaaaaaataataataataataaaaacgccaggcatggtggctcacgcctgtaatcccagtgctttgggaggccgaggcaggcgtatcacttgaggcaaggagtctgagaccagcctggccaaacatggcgaaaccccgtctctactaaaaatacaaaaatttgccgggcctgctggtgcacgcttgtaatcccagctacttgggaggctgaggcatgagaatcacttgaaaccaggaggcagaagttgcagtgagctatgattgcccccctgcactccagcctgggtgacacagcgagactctgtctaaaaaaaaaaaaaagagcagcctgggcaacacagtaagacctccatctctacaaaataaaaaataaaaattagtcaggagtggtggcacttatcacagctacttgggaggctgaagtgggaggatcacctgagcccaggaggttgaggctgctgtgagctgatggtgccatcgcactccagcctggacaacagagtgagaccctgtctctaaacaaaaataaattgtttttttttctactggacttaaacaatctgccctccttggcctcccaaagcaccaagcctgtgtcttctttttcatcacagccgtggcagaaggaaggaggtgactggaagccccactctctctgagtagctgagggaatacaccctgactataggccgagacagtccacatcagctcttcaataggatttagtggctttgcataaaatggaaaagcagctgtgattgcaagagaaattaaaaataaccaccatctgaaatgcaaattgaaaacagtgagacaacacatgtcactctggcaggtgacccactgtgctggtgaaggcatgcaggcactctcagacttccgcagagagacctgagtaatcaattgacttccacaaagggcgacttgccaacagctatcaaaagtactcaggcacatcccacttggcccagcaattccacttccaggaatttctcctgcagaaatacatgtgcacaaacaacgtaggaaagcactgtttatagtaacaacccaactaggacagaccaggtatatttagacaacaaacaaggaagctttttactaaattgggatgatctctaagaagaaggtacgtagaaaaagcaaggtgggagaacacgctatgtgcttgtactatgcacgtcaatgaaaaaatacacaaagaattgacaggccaggtggagtggctcacacctaatcccagtactttggaagactgagatgggagggttccctgaggccaggacttcaaatcagcctgggcaacatagcaagacccccccacatctctacaaaaaaattaagaaaaaaattagccgggcatggtggtgtgtacctgtagtcccaactactgaggaaactgaggtgggaagatcccttgagccaggaggtcgaggctgcatggagctttgatcgtaccactgccctccagcctgagcaacagagtgagaaaaaaaamagactttttttctatttctggaaaaaaataaagaatttataagtatgatggttctggtaatagaagtaggtggctaggcagagtggacacttcacactgcatactcccmtattttccgaaatctgagctttttttttttttttttttttttttttttttttgagatggagtcttgctctgtcaccctggctggagtacagcagcaccatctcggctcactgcaacttccgcctcctgagttcaagcaattgtcctgcctcagcctccccagtagctgggattacasgcgtgcaccacacgcccacctaattattgtatttttagtagagacagggtttcaccatgttggccaggctggtctcaaactcctgacctcgtgatccgcccacctcggcctcccaaagtgctgggattacaggtgtgagccaccatgcccagccaatctgagctatttaaaaactaaaggtaaaattttaaaaggggaaggggaaaatgggaagtcattgttttaaggggacagagtttctgtttggggtgagaaaactctagaaatagtgggggcgtggcacatgattggaatgaatggcagggaacggcacgcttaaatgttcctgtacgtttcacaggagaagtcaatgcacacacaagcgccgcaacccagtccaaggctttgctcctacagggccttacagggggtatttgagacgcccaccttaatgcaggttggacccagctccgggctgcsgggcttccccgccccggggtctttcgtgtgagccccgtggcgggggaycctggcccaggacatggcgcggagaaggctgtgggcggcgggacagggtgccttcggctgccgggttaagagtggatcccgggatacatcctccagcgcctgccctcgggcctgtgtgcacccccatacccagcggggccgtccaagagcttcaaggagggcacagcgcgacccgccctcccctcagccccgcacaccgtcccacggccccgcacagcctccctcccacacagcgccccacggcacccgcacagcgccccacggcacccgcacagcgccccacggccccttcatggtccccgcacagcgcctcacaacccgcacacagcgcctcacggaccctttacggcccccgcagagtctcccayacggcgccccacacagagcctcacggaccccgcacagcgcctcaaggtctccgcacagcccccagcacagcgcctcacacagcccttcgcacagccccccgcacagctcctcacgggccccacacagctgycgcacagcsccgcacaagcccgcacagcaccagcagacaggtagcccccacaggcaacagcgcccacctcgccgcgcccagaccccgratcrccgacgcggacgccaggcgcctgggcacacggcgcctgcgcagacaacaccacgccccaggcctggcgagcgcaccctgcgggtggggcggacctacgtcagcaacccatcgtccgatcccgtccattggctgagaggtaatgcgtgcgcccgactcgccgctgattggtcggcgcgcgagcagccgggctcgcacgggccaatcctgtggtagcgcgtgaggaggcagaggcctctggggtgggatcgcgggccgtaagtggctgtggagctggggtcactgcgcggtgggaccatggcctcggagaagccgctggcggcagtcacttgtacagcgccggtcaacatcgcggtcatcaagtactgtgagtgccgcgggccggcctgggacggggatggccgggagcgaggccgggtacgcgggggtcgcgcgctgattcggcggcgcgctccgtcctgccctcccagggcctcgacagacggggaaactgaggctcagggaggggcgcggcggtggtcgggcggggccgcgcgctccttcgcgtgacaagctcggcgccacccgttcccccgcgacggctgccgcccctgcagggtcgcccggcgcctgcccattagcgattaccgaactatcgaaatcatcaatcatcgattcccatgaatcgtaagaatccgccgtggtggtgcgcgtttgtggctccagctactcgggaggctgaggcgggaggatggccagagcccgggaggtcgaggctgcagtgagcggaaatcgcgccactgctcccccagcccgagaccctgtgtccctccctcgccccgtttctcccagcggtaacctccaaggagcggtaatggggggcccgcaggcccacatccgtgcgggggaggccggtccgcacctgtgcgttcacagccccgcccctcccctcgcgccggggttacctggccgccactgaccactcatttctgtaacgtcatttcaaaatgttctgaaactggaatcgcagttatgtggcccacccagtatcttttgagtttggcttatttcattcagcatagaatgtggacgtgccccgggattgtatcagtgctttgcccctctgttgctgagccagtccgtggaatccatggaccaccctctctctagccaaggcctcaccccgcaaagagcatctaacgttttctttctttctttcttttctttccagaagccgccaccacgactggctaatttttttgtgtttcccttaccaataaagctgccataaaatgttgtatacaggtttttgtgtgaacatacatttccattcttctgggataaatgcccaggagtgcggttgctgggtcagatggtagatatatatatatgcctctctgtctctctctctctttctatgtatatatgtatgtttgtgtgtgtgtatatatatatatacacctatatagatatatgtgtgtgtatatgtatacacctatatagatgtatgtgtgtgtatatatacatatatatattatatatatactttttttttttttaaagaaactgtctaattgtttttcagagtggctgggccattttgcatccctacggtgatgcagattttccgcatcctcaccagcatttggtggagttgctgtttttcattttagccgcgtcctggtagggatgtgctggcagggtgctgtggtcctcattcgcgtttccctgttggccagtgacgtggagcatctttctttgtgcttatttgccatctgtgggttttcttggtgaaatctctcttcatattctgtgtccacgctcgaactggatggtttgcttttttactataagtttggagagttcattacacattctaggctgggcacgctggctcaagcctgtaatcccagcacttggggaggctgaggtgggcggatcacctgaggtcaggagtttgagaccagcttggccaacatggtgaaacccccgtctctactgaaaaaaaataaaatatgtattctagatattagtctcctgttggacatgtggtttgcaggtattgtctcccaaactaactaatctttttgtcctcttaacaaagagccagtttttcattttaaagaagttcagtgtatcaatgttgatgtcaagtctaagacctctttgcttagccctatgtcctgaagattgtctgctttcctccaagttgtacaggattgccttttatatttaagtctgtgatccaaggttgtccagttagcccagaaaggctatccttcctctattgagttgcttttgcacttttgtaaaaaaaaaaatcagctgggcatgtttgtgtgggtctatttctggattttctcttctgctatttttttttttttttttttttttttttgagacagagtcttgctctgtcacccaggctggagtgcagtggcacaatcttggctcactgtaacctccgcctcctgggttcaagcaattctcctgccttagtcttccgagtatttgggactacatgcacgtgccaccacacttggctaatttttgtatttttagtagagatggggtttcaccgtgttagccaggctggtctgaagctcctgacctcgtgatctgcccacctcagcctcccaaagtgctgggattacaggtgtgagccaccgcgtctggccttttatttttattttttatatttatttattttatatttatatttttatatttatttgtattacttttatatttatttttttgagacagactgtcactgcgacacccaggctggagtgcaatggcgtgatctcggctcactgcaacctccgcttcccgggttcaaccgattctcctgcctcagcctctcgagtagctgggactacaggtgtgcgccaccacacctggctaatttttgtacttttagtggagacggggttttgccatattggccaggctggtcttaaactcctgacctcaagtgatctgcctgcttcggcctcccaaagtgctgggatcgtaggtgtgagccactgaggctcaccaacagtgatatttatggaaacgtgtccattttcttgtaacgttcaaagactctggtcttctttaaaccttacgtttgagctggtttttgatagcgcgctggtggaggagggggtgctggctcaagataaggaggcagaagtccaggttcccctccccaccaacgctgtcccatccccaccaggccctcaggaattcctgagtgtctgcttggcctctgacaagagccggcaggtcaggggagtccagtctcccgtgtgctctccaatgactcctggggaggtgaaagtccccactccttcagggagggaaagggggcggggcactgttccagcctggagtgtgggagggatctgtttctttttttcttttctttttttttttttttgagaaagggtctccctctgttgccaggctggagtaaggctggagtgcagtggtgccatctcggctcagtgcaacctccgcctcccaggttcaagcgattttcccgcctcagcctcctgagtagctgggataacaggcgtgcgtcactacagcctggctaatttttgtatttttagtagagatggggtttcaccatattggtcaggttggtctcaaactcccgacctcaggtgatctgcccacctcgacctcccaaagtgctgggattacaggcgtgagccaccgcgcccggccaggagtctgtttctgtgttgctaggctgcccttcctggtcctgctagggagggctggctttggttggcagttccagcttctgcagggctaggtctagggcaagcagaaaagaaagccccgggctccccctgcactgtcccacagccgccctctgtcacccgtgagagtctcacctgtgatgtccagggtctcagttgtccccagtgggaggaagcgggagaagtcccctggcccaccttcctgaaagcagaggttcgcccggcctgtcagggcagcggcgtccgcctgcaaggagggccgctcagtgctgtgcgtgaaagagcctcgcgagctgcagggcgtggttctctgccaggtgtccgcgtttatcacccctggaactgtccgccatcctcagagacctcccctcgcacaaaaccgagcagatggtgtgcttagcgaagccgccgtggaataagacttcagctgaagcaccacgcagcgctcccagggcaaacgtttcctttcgggctttctggaagtttgatttcacgtgctgtcccatggccgtgctgggcagaaaggggtttatcctggatgttcctggggcatatgagcagtgagatgtgaggagttctcagagctgggctccttttgtttgggaaggtggaggggaggcaggccgcggtgggagcgatccgcacctgggcactcacggatgctggagtagaagcgatgaaggaatggggagcggggacggaggttggctggcctccagctctgctctgggagcctgagctcagtggggtgggagcagttcttgcaggccggggtctggcaggaggaggggcacacaggttgtgcggtgagagacgggactgaggcggatgggggccgtgggtggggggtgggggcacctgtggggaacactgggggagggtgggccgggaagcccaccggcctggccctggctgttcattacagggggcaagcgcgatgaagagctggttctgcccatcaactcctccctgagcgtcactctgcaccaggaccaggtatgtgtggactgacgactaaacaccacagtgccatttccagaacatttgtagaacagttggtacccgttgggtatggtggctcacatctgcaatcccagcacttggggagagtctcttgagcccaggcattggagaccacagtgaaccatgatcgcaccactgcactccagcctgggtgacagagtgagaccctgtctctgaaacaaaaaaaaaattggtacttttttacctaaaggctaggatgagatggcctagcgacgactcccagccagcacgcagtgtctgttccatctcccagtattaggagagctgagcacagcacacacgtgcccccaggtctcgtcacacatgcgcacaccgtgccccaggggctcccctgggagtccccgtctctttattcaggataaggcctggttgctccacaaggtgtggcccacgctttcatcccccacgggcttccccactgcccagctgagactggcctttccccccctgccctcagcagggctgaccttgctcgagtgggcagccatgaggctctctcagtagaaaggggtacctggctggcatcggtcctcaatgctggcctctgaggtggccctgggtttccttttcagttaaaaaccaccacaacagccgtcatcagcaaggacttcaccgaggaccggatttggctgaatggccgggaggaggatgtggggcagccgaggctgcaggcctgcctgcgggagagtgagctggggtccccataagcccatccctccctgttgtcagcagggtccgagcatccagaaagtgcttctgcctctgtgcccctcctgaggcagcaggcggggtggctgggaaccagacatgcccgctgggccgccagctccagggcagtggcccacctcaatgaccagctgggcttgggtcagtctggggttttcccgggtaagaaactctccacgaggagtctggcaggcagaggcctggtgttcagctgtgaccccgggcaggtgggcaggagcagggcgggcagggtgctgacggctgggccacacgctgtctcattgtctctgcagtccgctgcctggcccggaagcggaggaactcacgggatggggacccgctgccctccagcctcagctgcaaggtgcacgtggcatcggtgaacaacttccccacggctgcgggcctggcctcctcagcggcgggctatgcctgcctaggtgggtgcccacagagacccgcaggggttctgggctgtgggcgcaggagccacttcatgctcttcccgg

SEQ ID NO: 96746 - DNA, 20607 bp, Homo sapiens
ctcaccaaacaagcttctaagcaccaatctccctctgccatcagattggctgctttagctccatagttctcttctcgcctcatacttgctttcttcccctgcctttctacctcaagcttcctcgccggcttttgtcacagtctcattgctcgctgacttggaggctagggctggtctgcacttagcctctcccttcctaatttctagccctagtgggcagtcctgtcttagccctggctgacctccatagtgtatcatgttcctgctaccttcctgacccctgtgctcagcctggaattgttataggaggtagcaagggcactcagaaaagtcagttggaaccagtgtcttggtgtttactgtttcatgtcttagttcctgagttgggggtggggtttgatagggaaggggtggtatagctagaatgtgaactaagaacttctccatctgctttactttttctttcttcgacaaactgtcaccttttttactccaaactgaccaagaagttgtatttgccatttgtggctactcaagtcttactgtccagccaagggcccctacgtctcagcccaatgggttggttaaaaaaaagagagaagccactctcatttctgtatcacagttgcccttttttagcaagtgtgtgaattcacagtgcttttctatgaataaatcatggatcacataaaagatcatttttctaaaagcagaaattgtgttctctcactaaatgaaacccatctctcctttctgcattgccctggctgggccagggagctggttcagcctacagcacagtgggtgcctagtggtctaaggagatgcagaatgactgacagataaagaatttcttgccataccagacccttccccagggcttacagacacctcagagccttgtcctgggaagcaggtaccaccaggaagggtggaataaccaagatcttgagaaaattaaaggggatgctcagaaaagaatataaagcaaccttgagttgccagagggtcttttggtttcagaggacttcttgctttggtgatgatcgacttgtctaaagctccaatcctaagcaacctagctctgagctttcatgtcctctatatattttggtgtcaaagctgagggtccctcagcttctccctgcttgcctagactccatcttcttccccatgcctctctgaagtgttctaaccccttctgtgcccctttttgatgtatacttcccttcctccccagacataaagccctatcaatttggcctttgtatgttgtgaggaccccacccgtttttctgcaaatgtcacaacctgaactgctaggaaagctctaccctaccccatgtagttctgggacttaggtatctgagagtaagatgggaatgagaatccttaagtgctatagtacatattcactgatacctaacccccatgacttgtgaagaggatatagagagggttcccagggaaggagcagaggctaagaagaactgaggatatgggcacaatctttcacaaacaaaactacacaatagttcaactccgaaacttttattgtcctggaaacgatcaatcatctgtgttagtggtacttgagggtaaaggtatacactcagttctgtcgaagcagacgtgagtgtttatgcacagcatccacaaaggcgcccacatgttctgggtccatgtcaggataaagcccatggcccaggttggcaatgtagcgatgtggtccaaagtcatccagcatctgcttcaccaactgcccgatctcctcctgggggaccaacagggcactggctacaggaggaccagcaagcctttgtcctccctatatatactagtgacaaacgcatatgtaggcatgcttctactcagtgttattcagtcattcaataaaatttatcagatccctagtatggacccaggcatgaagcataaacacaaatgaacaacggcaacaaaaagtccggtctttctagggcttatgttgtacagagtagaagaaaaggacagacagacattaaaaacaagtgcacacagaataatacaaccacagccacaggagtgcacagtaacagacacacagaggggccctggctgttacctcagatgcatacaaggcacaggggtccaggttgccctgcaatgtcaccgtcttccccacacactccctggaagcaaagccagcgccacgttctggtaactgcatacatggcagctcccccagccaacacccccacctcaacctcaaggcctcacccttccatggcttaccgggctttctttggggccactgtccagtcaagcccaaccacctcatagccagcttgggccagctcctccagggcaaaatgcccatccttagcaaagatgatctagaaaaaagcagatctcaggctacagagggccttgctacaaccactaatctttcttgactgtacttctgctgccctccagtggtcactccagtccatgcaggacttagcctgaaagctccacaggaccaccttcactcaacccatcccaatcctcaccatgggcactggtgccaggcctgcctcccgcaacctggccttcacttgcttggccacatcacggatgtaaggcagtgcaaacttgttgaagagctgtgggccaagatgccctgcatgggactcaaacagctgcaatgcctagttagggtatggtgaagaaaaatatgtaacacacaaagaggaagtttcccccacatacaaaatccacctcaattttccccaaatgacttcaatccctgatactgcctgaccctaaaaacccagtaattaaaaaaaaaaaaatttactttcctcagatcccagcactaactttggtgtctgaatacttagagcattaagccccactgtcagtgtcaggatgggcttggctgctcagctagatcactggaggccaaggttctttcatccctggcattaagacccctgccctctcaggtttaggacactcttgcttctggtccttacagaccaaatccaagcctatttctctctctctcaggactcacctgggcaccagccaccacttgtcctaccagatatgggaccagagcatcagtgaggatgcgaagcagctggtgactagcctgaggtctctgatagagccagcgcttggcctgagccatggtgcttgagccaccaccctcaaccatgtatgtcatcagggtccactagagaaggatagaaagatggtgtcacagaagccagactgacccttccttttgtctaccccagaccttccagagtgatctccccgcgccccgagtccctgccctgtcccacattactggggcaccagcaaagccaatcagcggcacacgtccagccagtcgttgtcgggtaagggtgatggcttggaacacatagcctagctcagaggctaccacttctggatcccgtaggcgttctaggtcctgctcttctcttaatggctctgggaagctgggtcctttgccaggtaccatggtcacctccatgcccagtgcctggagggggagaaaacatctgggttcccaaaatggaatccaggaggaaaggttctgttcagctcattccaggaggaaggaaaaggagaataaaactctgccaaactccatttctttcaaccttagtttttccctcgatccagttaggataagtgcttattgtaaaccttgactggactgatagaaggattttcaaggcgtccttggattatattctaggatcaggtttgagtgggtacctggggtacaacaaggatgtcggagaaaatgatggcagcatccagagggaagcgacgcagtggctgtaggaaacaggagacaggttgctaggtggcagactgaaggcataaatctttccctcttttgtggacccctcacctgcagagtcagttcacagcaggcctcaggagagcgacacgtgctgaaaaagtcctgggcagcccgggtttccctaaactctgcatacagagggaagacagggctcagccttgaggccctccagagccctcccctgcccctcgaaaacttttctccctccggagttttatctagatttccagaccctgactcttacctggtaagtaacggcctgcctggcgcatgcaccaaacgggagtgtagtctgtttcctctccccaggctgctcgcaggaatgtgtcattcttcagctccggaaaaccctgaggtctggcgatcaggtgggggtgggggtaggtgtcagtatgctacgctggaggctggggaaagcgcgggttcataaggccgattcagtccaggaccgctatctacctcctccaggccagctcccaaaccctggctttccgcccgttccacctcctctctgcctatcaggtggtgcacaaactccagaagggcccgccctggggcctcttccctccacttagtctctactcttccaagctcgaagcaaccagagggactggggggagggaatgaaggcccactaaggatagtttgggggtcttcgaactagtgagcctcagaaacgggaatgtcactgggctggttcaggggctgagaaatacccaggctgggggataaagagggatcagagttgatggtcccagaatagagatcctggttggaaatcctgaggcatcccttgaattaaggccctgggatgaacatctcaaaaatccatggttttaggattcaggatcccagctaacggagttcaggttgggaggtctccagggtggggaaaggggagtagagggatagagtcctgagttggaagactcaaattagaagcccggctagccacaccgcgtgctctggagaactcaccccaacccattcgcttccatggtcagctgtctgtaactgcgagctcaatccacaatttaacctgaatctgagcctgccccccagtccaggctccgcccctttctgtagggaaccaagagcgtcgccatgttgaagatcacatgatcggactccagcgacagctccagggctgccctggctgctgcccgtaggacccctaccttttttcaccgtaaagtttgctgtagcgacgcaacaacaaaggcccaaaagaaaactccgctgtaaatgtatcttacggtgtcatgaggaatttgttctcatctgacagtctgggtatccggaggcttggcgcaagtcccactcatgataccaacagtcttatccagccaggtccatactatagcctggacctatagtaggtgcagaggttagctctgctcaagacagccccagcctttaaggagctacaagactggggaaacagaaatcagcaatcacattaaaatgaataatgatctccagtgtccttgggattaggagtgacaaacagaatcaaccctaatgactcaagactcctgtcagtggcaggggaaggggccattgtctcaaacactttaatcacaccacccataggatagggagtccagcagattcgctgggagtgggaggaaaaacagcaggccgaagaaccagaaaaatgactgttggcaatgacccaggctagctagaatggtgacttgaatgagggtagtagcagtagagataaaatggtagtcacaaggaaatggagagagggagattgatcaggtagcaatcaccaatcttgggtttggtcggctgggttagggtggcacagagataagtaatatggttgagtgtgggagtacacagtccaatacagtgagagctggggtgcgcttagtccagaacatacggcaaaggctggccaaaggcggggaagggcgtggtgggaagctctgtccgcggtcgcgccagctgttccccgggcagggtcgcctctaggtgctcacctccgccacttcgccatggcgggtcctggcccgggcgcggtgctggagtccccccggcagctgctgggccgcgtgcgcttcttggcagaggcagcgcggagcctccgcgccgggcggccgctgccagcagcgctggctttcgtgccgcgagaggtgctctacaagctttacaaggacccagcgggaccgtcgcgcgtgcttctgccggtgtgggaggcagagggcctggggctgcgtgtgggcgccgcaggcccagcccccggtaccggctccgggcccctycgcgccgcccgcgacagcattgagctccggcgcggcgcctgcgtgcgcaccacgggcgaggagctgtgcaatggccacgggctctgggtgaagctgacaaaggtgcgctcttccctgcccaggacccggtaaaagacccctggggccagagaaacctctggctgtttgcctttyctcccctgtattgagttggcattgcgttcggcgccctttgccctgggctgggcacgacaggcggctgggcagttccctgacggctgtccccatcctacgcgtcccggcaggagcagctggcagagcacctgggcgactgcgggctgcaggaaggctggctgctggtgtgccgcccggcggagggcggagcccgcctggtacccatcgacactcccaaccacctccagcggcagcagcagctctttggcgtggattatcggccggtgctcaggtactgcacttgaaggagcggggctggctgtcagaaggccgggccaggagggcttgggaacacttcagccacagcctggggtgggtgggatactggagcggaggcagggttaagagcagaaaggggcgggacgtgaagggggctcggatggagactgggagatagagccctgaagaaggctacacggcatggaggtagtgtcttgctgaccgctgatgtctccccatcccactccctactctgtgcccacaggtgggaacaggtggtggacctgacatactcacatcgcctgggatcgagacctcagccggcagaggcatacgcagaagctgtacaaaggctactgtgagtgagctggaatggggtggggaggaaggagctctgcgtytgggcccagtctaattaggggcttggggttgcttagctatgtacccccgacatggacctacgagtgcgacgaggacctgatccacttcttgtatgaccacctgggcaaggaggatgagaacctgggtagcgtgaagcagtatgtggagagcatagacgtttcctcctacacggtgggtgctggggctcctcccaccccaggcaagatatagtcacacccctcaaggctagatccagaaagaacccccacctgcaggccaggaccaaaacagggtccccacaggccacactcagttcagctccccatcttggacgtctataggaccccttacatacccagcggccccctatcccataccagttgcctgttagcccaacttcactatgctttctctctggtgctcctggcccagagcacaagcccagtgcagggagggagggtaactgctgacttcacgtctctgcccctccccaggaggagttcaacgtgtcctgcctgacagacagcaatgccgatacctactgggagagcgatgggtcccagtgccaacaytgggtacggcttactatgaagaagggcaccattgtcaagtaagtaggctctgggcaggacagggtgggtgggctatgtccctgtgggttcacaaagactcatattcacactctgacccttcaggaagctgctactcacagtggataccacagatgacaactttatgccaaagcgggtggtggtctatgggggtgaaggggacaacctgaagaagctgagtgacgtgagcattgacgagtgagcacgctggcctggggagggaagtagggcatgttccaagcctagcccagcttgaaagcctaagtttgagtgagactccagcagtctctgaaggcctgaggcaggaggtatctgaagtgcttcacactcatctcctcaggaccctcatcggggatgtctgtgtcctggaggacatgaccgtccacctcccgatcatcgagatccgcatcgtggagtgccgaggtgaggtttaaggctataaggagggaaagagagcccggcgtggagatgggggcaaacagasagtgwgtgtggagagaagaggatgggcttggagttggggtgaaggcgatgctgaactaactccaggatttggagctttggggcctgagccagctgggacatgccaggtataggcctgccttaaagccatacaggtggttgggctcacctggaagaggaactgagttgggaccctcaggcatcccagcattctagtggaagacagaggaatcagcaggaatagatcaatcagaatcaggtgatagaaggtgatcccgaaggtcccgagtttctaggggctaacggtgacacaaggctgagcgttcaaggagccggtcccaggtctgagggccaaggaggcagcaggtgctgtaaatgaccttactctgaccccttcccccagatgatgggattgatgttcgtctccgaggggtcaagatcaagtcatctagacagcgggaactagggttgaatgcagacctgttccagccaactagtctggtgcgatatccacgcctagaaggcaccgaccctgaagtactgtaccgcagagctgtcctcctgcagaggtggctgtggtcctggacctatgggcccttcccttcccccaacattgagcyttgtgtgtctgcatggaggaggttcccaaggtctcatagtataagctgttcaagggtcagagaagcccccaggtcctgccttttcctgtccctttatgttggggagttgggggtgttacaggtatgctaaactctttagctgcagtctrtctacccatgccagattcatcaagatcctcgatagtgtcctgcaccacctggtacctgcctgggaccacacactgggcaccttcagtgagattaaggtgagccgacccagccagtgctggtcttggcatttccccttcctgctcacgtagttgttcattccttagcagagttcctaaaatctactctagggcaagacctttgctgggtctgggaacataggaagaaagccagaacaaatggtccaaatttagtgtttgggaggctgttccccagcctccttggtattccagagtgtgtggaatacccaagggctattgacagcacaggcagggcagtttgcgtgaaaggtacatacagggagttaccagcagctcaagatgtcttgagaaaagtgtgccagtaggtgtgagtatgacagagggatgagggtggaggatgtgggcaggagacaggtcctggttgcagagggccctgtgggccaggctgtgaagcaaggactttgtcccagggtagtggagctgttggaaaggtaaggaaggtaatgacagtattagatttttttgttttagaaagctctccctggtggctgaactaaggaggggactggagacaargacagggatggactagacttgaactgaaacggtggaattggatacaggcagaggggaaagttccagggcctggacrgaggctgactgcccactcattcctgctctggccacctctcctcactagcaagtgaagcagttcctactgctgtcccgccagcggccaggcctggtggctcagtgcctgcgtgactctgagagcagcaagcccagcttcatgccacgcctatacatcaaccgccgtcttgccatggaacaccgtgcctgcccctctcgagaccctgcctgcaagaatgcagtcttcacccaggtctgcaccacctagggtccgactgagataggatcagtcaagggccaagggggctaggccaagagggacctgaacaagttcttggggcaagtatagggccaggtcttgctttcctatgactcctttcctccttgcctccaggtatatgaaggcctcaagccctctgacaaatatgaaaagcccctggactacaggtatggcatgagagtgagggacttactcgggacacctgtttgtgcacacaaacacacacaaacacacacacacacacacacacacacaactgctcgaggcacccctcgccatgactgcttttcccaggtggtctctgagctgatgaattgtgctgcacctggccccacataatgacaaatctgcccacgttttttgcaggtggcccatgcgctatgaccagtggtgggagtgtaaatttattgcagaaggcatcattgaccaaggtgaggccctgagggaggatctcaagggtcctgcttgctgccctatcaaagtggtagaggcttttcaccagctaatgatgatgggggacctattcattmccccattatgggagctgggctcttgagtgcccagctgagggcatctgtcatttcagggggtggtttccgggacagcctggcagatatgtcagaagagctgtgccctagctcagcggatacccccgtgcccctgcccttctttgtacgcacagccaaccaggtaatctccgtttccatctctgcaaacctcccaggtgccagattgagctagaaagggggcagaggagggggccagattgagctagaaagggggcaggcacagtggctcacgcctgtaatcccagcactttgggaagccgaggcgggcagatcacgaggtcaggagttcaagaccagcctggccaatgaagtgaarccccatctctataaaaataaaaaattagccgggcgtggtggcacgcgcctgtagtcccagctacatgggaggctgaagcaggcgactcgcttgaacccaggagacggaggttgcagtgagccgagatcacgccactgcactccagcctgggtgacacagtgagactctgtctcaaaaaaaaaaaaaaatagaaatagggcagaggagggactgagttgctcagggcaacctctgggcagacagggagaggaggagccactgtgcatttgaagggatcatttagtggaaaatgttcccagtggaaaatgttcagggaagtctttgggccaggaaaatagggtgtatctcatgccacactcacagctctgtctctggggcagggcaatggcactggtgaggctcgggacatgtatgtacccaacccctcctgccgagactttgccaagtatgaatggatcggacagctgatgggggctgcccttcggggtaaggagttcctggtgagtagccttatccacacccccgtccgatcagccctggcccttggaaggaaaggccagccaaacctgggcagctcagggtgagaagacagtggggagtgtttgtcacacaggtcctggccctgcctggttttgtgtggaagcagctttctggtgaggaggtgagctggagcaaggacttcccagctgtggactctgtgctggtgagtaggacctggaaccagtgtttcctctgcccagcccctaaaggttggtcctccctaaggctgttctgtaccttgttctttcaccacacacaagatccctttccaatccatccactcccatggcttcaactactgtctgtagactcgtgacccctaaaatcctgacctctagccccagcctctcctaagcctggggccatatatgtatctgtaccctcgacgtttgccccaagatggcatctcaggctcagtgtgttctttatcttctccgaagactactcccctctagggctcctgcctcagaagggcaccatgtcccactcctccccatcccaaagcccacagggccatccttcaccccttcttctccctcgccaccatattcttaagtcttcctctgtaatctgtctgcttttcctgtctcactactgtctccctgcctggttgaggacacctttcctccttagctaatcacttactaaaaagctggtgtccctgtctccgttcttacccgtttggtctccatgcagccacagtaattcatttcactctccttatttaaactcattgatggctcggccctgggcttaggatagaatgcagaatctgtaaaggccttacgtgaaccctgtgtctccagccacttggttcacattcaggctccagccacacagtttccttaggccttttgctctttccagctttctccaagatgttctctctcctaacttcccttatgtcccagccatcatttgggtctcagctgagacaccattttccacaggatgcctcctctggcctccaaggctggttaggtgttgtcttgatgcttttacagctcttgtactgacaccctcattccctgctgcctccatggggactgccttgcctggctgtctctgcttccctgtgagcatcttgtggaaagacagggactatctccacagtgaaaaggttacytccctgcctctctccaacccctaggtgaagctcctggaagtgatggaaggaatggacaaggagacgtttgagttcaagtttgggaaggaactaacattcaccactgtactgagtgaccaacaggtggtggagctgatccctgggggtgcaggcatcgtcgtgggatatggggaccgttctcgtttcatccaactggtccagaaggcacggctagaggagagcaaggagcaggtagtacccagaggctagtagagcagagagctttggcccctcctgagccccagctcctgggacccagaacacagcctgtaagccaccagtactccaagaactctggcccccaccattcctcagtgccacctttctgctgctraaaggccacagtgatgccccccagtgtgaggcgggaggtgtgccctcttccccagccaagcctttttacccactccccaggtggcagctatgcaggcaggtctgctgaaggtggtaccacaggctgtgctggacttgctgacctggcaagagttggagaagaaagtgtgtggggatccagaggtcactgtggatgctctgcgcaagctcagtgagttccccaaggcagggcagggcagggcagcacagcacagcacaggggttggggctcaaggactgggcaagatgagacccaagaatgaatgctggccttgtctccaccagcccggtttgaggacttcgagccatctgactcgcgggtgcagtatttctgggaggcactgaacaacttcaccaacggtcagtggaggagggcagggtgacacctgggtttggactctgctgctgagttgcagaggcagggtagaagttgtagaccctccctcaccatccatgcaggcactgatttccttctccctccagaggaccggagccgcttcctgcgctttgtcacgggccgcagtcgcctgccagcacggatctacatctacccagacaagctggggtgagtgctggagggaggcctgaagagactcatggccgccttctgtcctccctccccacacacgtacatgtgccccaacacatcttcctgacctatggtccctcaatgcccccagctacgagaccacagacgcgctgcccgagtcttccacttgctccagcaccctcttcctgccacactatgccaggtgggttttttcctaggctcgatttggggcccaggggaccccatcacccctggtagcgatgtagggacctgaccaagtccccattcccacagtgccaaggtatgcgaggagaagctccgctatgcggcctacaactgcgtggccatcgacactgacatgagcccwtgggaggagtgaggygtgccrccggctgtgggaycagcaagactgcacgtgtccctcttggccttgcccagggcgaagacaccttccctgccctggtttggctgacgtgctcagcaaaaccccatgtgccctgctcctgtgtgcagttggggtaggggcagctggcatggtcaggtaacactagtggcccagccccgcagacccacaagccctacccgtgctggggcttgcttcccgaggtatttcacctcttaagagggaatcttccacaagcccagcacaagctgccaggcctgagctacttgaagggggccatctaggtccccaacccatggactttgcctccattttcagctccgccttttttctcctattttctctctggctttcttcagccatgactcacaactaaaaacataaaacactggaggttagtggaggcccctccccaagcagggagcctgggatgggcagggagtgatagccaaactccttggtcacctgctccaagaaggaagcagtagctgagcacctgccctcacatwctgctcttttcccctctccctcyayaccagagatgtggtgagctctgttcttctaccaacccagtctcaacacacaaagtgccaccaccttccctgactcagaacccacatccactcaatgtgaactctactaccacgacctccccatattcctcacttctccatcacctccagcctgactccctgtctgccctttcacccccaagattttgcacaggttaaggccagttatggcctttttgaaatctgtaatagctcccctttccccaactctaaagcctagaccttaaacctgttcctagagctatgcacacccctgccccagtttaccgttcctccctcagggcctccgtgacactccatgaaaagaagttcttgcataccggaaagttgaataaatggatgaattcattccttcagaatgtgtttattgggccctgggcttaggcacagggtcacaaggagaaattgactttagtgtcctactcggagccaagaagatggatgtgaaatgcaagtagaggtttctcagtgacagactttgcacagttacatatctggggctgagcagagacgtaagggccccactgcgcagaaaagggaaaacaagcaaacaggctggcctggcattttctggcatggatatggtgatttggaggatgggagtccacttctggagccaagtgggcagaagaatttgacatcatagaagacagagacgggagggctgacaaaccagccaggtcagggttgttgacagaagtggaggaagtagtgtctttattaccctgcccccaacccgttgcagtcctttttgggtgtttgtttgtttgtttgtttgtttgggtctctgttgcttaggctggcgtgtagtggtgcagtcacggcttactccagcctgggcctcctgggctccagtgatcttcccacctcagcctcctgagtagctgggaccacaagtatgccaccgcttctgggtaattttttgcagagataggggtctccctatgttgagcaggttgttctcgaactcctggcctcaggcattcctcccacctcagcctcccagagtgctaggattacaggcctgagtagtcttcaagaacaagtacctggggccggcgactcacacctggaattccagcactttgggaggctgaggtgggcggaccacttgagcccaggagttggagaccagcctggccaacgtggtgaaaccctctctctattaaaaatacgaaaatgagcagggcttgggtgcgtgtctgtggtgccagttgggagactgaggtgggaggatcgcttgagcctaggaggtggaggttgtagtgagccaagatcatgccactgcacttcagcctgggcaacagagtgagaccctctatccaaaaaaaaaaaaaggagtatcagggagaaccctgtgtacgaacagtccccctacacccccacagtggccagtcacgctctcaagcacagccccagggtcccagtcgtctcagagtccaggtacaatgtgagaccttgtggtggctgattgtccagataagtggcttggcggagtctcgccctggcaactcttccccttcttgtcctctagggcactccctgacactgccctagttgggaaacttactgtgcaagaggttgatctctgcctgcactgtgtgcaccctgagacctatcccaaaacacggaacttgacagctcagtctctcggctgccaccgcctcccctgtacccctgcaccttgggtggtgaacccccttcccttccaggaagcagaaggcacagaaacccccaaggccaccacttccacccagctctgctcttcccaagtcagggtgcacctctcccttctctcccctcaggaaagggcccaggccacgtgctcctacaggaagtagccagtttctgtgcctggtatggtcacatgaactctttagtcccttttttactcacactgtatattttgtagcctgcatttcatttaacccttcattcattcaataaactaatatgcatcaagcccctaggtcaggcactgcactaggtgaatggataaaatcgtggctaaagcagtgataatttttacccttatgggatttaaactctaatgggaaagacatacaaacaaagagttgcataaacaacacttaagaacacttttgtaaaagctacaaagaagtgaaaattgttaggggacagaacaggatcgttctaaccaatgcagctcaatgaaatgcgaaattcctaaggcatgtaactcaacacagaggccagctgagaagactgttgagtactgtgttgctggagtgtaaaagaaagagagaaatgagactccagtcttataaggccagttttaggattttataatgagcagccctgagggcattaagcaagaaagtgacataactatatttgccttggtggctgtgtagagaatgggttgagaaggatacaggtggcagggattaatcaaagcaggaaatgatgacgactgggccaagggggcactcattttaaccattattattattattatttatacagcgtgtctgtcgcccaggttggagtgcagtggcgtgatctcggctcactgcaacctccgcctcccgggttcaaacaattctcctgccccagcctcctgagtagctgggattacaggcgcccgccaccatgcccggctaattttttatttttagtaaagacggcgtttcaccatgttggccaggctggtctcgaattcctgacctcatgtgatctgtctgccttggcctcccaaagtgctgggattacaggcatgagccactgcgcctggccgaccattatttttataggtagcaattgtattacattataaggaactttcataatttgtatttattttaaaacctctacagatggacattaagattgttcacaaattttcaacactaaaaactacagatgttgcaataaacatcctcatgcatataccattgcaatatctatttatttccttagaataacttcttaaaatgacttcatcaaactgcgaaactgccctgtaagaaggatgaatcaattttcattccctctagtgtctatttcctaaactctcaccacctttgagcattaacacttaaaaatgttttttgtcaattcagtgtgctggaaaatggtaaaattgttatgttttatttgcattgctttgtttactatatggagccattatttttcttctttatgagctatgcttcatatatttttgtccatttttctgttgtcttcattatatttttcttattgatttgtagcaacctttgcatggtactaaaataataaaagcttggtagttgctgatcatcctcttagcaaagcactgtgctaagtaacatacatttactgtcttgttttatcttttcaacaactctgtgaagtaagtactattactatgcccttttccagatgagaaacctagagcaacgaggaattaaattacttgcccaggataagtggttaagtgatggagattaggatggtagtctgccagctccaaagccaactgactcagtaactgaggtgttatatcctaatccctttgtccgtcatgtcaggtgttgcaaatgttttcctagtctgtcctttgccttttaatttcatgcatgttcttttctaatgtaaaaagttcaaaaattttttaataattttttttttttagatggagtttcgctgttgttgcccaggctggagtgcaatggcgcgatctctgctcaccgcaacctctgcctcccgggttctagcaattttcctgcctcagcttccttagtagctaggattataggcatgcgccaccacgcccggctaattttgtatttttagtagagacggggtttctccacgttggtcaggctggtctcgaactcccgacctcaggtgatccgcctgcctcagcctcccaaagtgctgggattacaggcatgagccactgcgcccagccacattttttaataatttatttatttttgttatgattatttttttagacagggtcactctgtcccccaggctggagtgcagtggcataagcttggctcactgcaccctccacctccaggccaagtgatcctcccacctcagcctcccaagtagctgggactacaggcatgcaccaccacacccagccaagttgttttttttgttttttttttttgtagagctagggtctcagcatgttgcccaggctggtcttgaactcctgggctcaagcaatctgcctgcctcggcctcccaaagtgctaggattacaggcatgagccaccacgcctggccaataattttttatttttcatttttgtgggtatataggtttatatatttatggggtacatgagatgttttgatacaggcatgcaatgtgttatattcacatcagggtaaatgggggtattcatcccctcaagcatttatcctttgtgttgcaaacaatccaattataccgttttagttggtttggtttggtttggttttttgagacagagttttgctctgcaggctggagtgcagtggcatgatctcggctcactgcaaccttcacctcccaggttcaagcgattattccacctcagcctcccaagtagctgggattacaggcgcaagccaccatgcctggctaatttttgtatttttagtagagatggggtttcaccatgttggccaggctggtctcaaactcctgacctcaggtgatctgcccaactcagcctcccaaaatgctgggattacaggtgtgaaccaccatgcctggcctcttttagctgtttttaaatgtacaattaaattattattgactatagtcaccctgttgtgctttcaaacacaaggcattactcattcaaactcttttttgtactcgttaaccatgcttatctccccttaatccccccactccccttcccagcctctggtaaccatccttctactctctatctctatgggttcagttgttgatttttaaacctcaaaatgtttatgagctcaaaattttttctttgtggaagaacctatattggatatataccattgggaggcaatatactgttgtgtactagttaagagcacattctttggaatcagcttgactatatccatattctggctatgccacgtactagctgttgaccatgggcaagttgcttaacctttctgtgcctcagattccacctttaaatttatttgtttgtttatttgtttattttttgagacagagttttgctcttgttgcccaggctggagtgcaatggcatgatctcagctcaccgcaacctccgcctcccaggttcaagcgattctcccgcctcagcctcccaagtagctgggattacaggcatgcgccaccatgccctgctaattttgtatttttactagagatgtggcttctccatgttggtcaggctggtctcgaactcccaacctcaggtgatccgcccgcctcagccttccaaagtgctggattacaggcgtgagccaccacgcctggccttaaatttttttaattaattatttttcattcacaataattgtatatatttatgggctacaatatgatgttttggtctatgtatacattgcacaaagggtcaatcaagttaattaacatatccatcacctcaccaactaatcattttttgtggcaagaatgtgaaaaatttattcttttagcgattttgaaatatacatttttattaactgtggtcaccatgcagtgcaatagctgactaaaacctgttcctacagtcttactgagattttgcaccctttgatcaacatcttctcttttaccaccccctagccctctctgtttatatgaaacagagtctgggggacagaatgagaccctgtctaaaaaaataatcttaataaaaataaggccaggcgtggtggctcatgcctgtaatcccagcattttgggaggctgagccgggtggatcacttgaggtcaggagctcgagaccagcctggtcaacatggtgaaaccccgtctctactaaaatacaaaaattagccaggcgtggtggtgggcacctgtaatcccagctacttgggaggccgagggaggagaatcgcttgaacctgtaaggaggaggttgcagtgagccaagatcgcaccactgcactccagcctgggcaacaagagcaaaactctgtctcaaaaagaaataaaattaaaaataaaaataagaccaggtgcggtggctcatgcctgtaatctcagcaatctgggaggccaaggtgggtggatcacttgagctcagaagttcgagaccagcctggccaacatggtgaaaccccatctctactaaaatacaaaatttagccaggtgtggtggcagacgcctgtaatctcagctacttgggaggctgaggcaggagaatcgcttgaacctgggaggcaaaggttacagtgagccgagattgcac

SEQ ID NO: 96747 - DNA, 150222 bp, Homo sapiens
agtcccctctaaatgcagtattttgtctttcaatagaggcaagatgaatgcaaacatggatcattcttcattatggatttttttttttttgagacggagtttcgctctgtcccccaagctggagtgagtgcagaggcatgacctcagctcactgcaaccactgcttcctgggttcaagcgattctcctgcctcagcctccagagtacttggaactacagatgcgccccaccacacccggctaatctttttgtatttttagtagagatgaggtttcaccatgttggccaggctggtctcgaactcctggcctcaagtgatctgcccgccttggcctcccaaagtgctgagattacaggtgtgagctaccgcccccggccttccattttggaatgttaatgctttgtttcattaccttctttttttaaatttttatttattttttatttatttttatttttttattatactttaagttttagggtacatgtgcacattgtgcagcttagttacatatgtatacatgtgccatgctggtacactgcacccactaactcgtcatctagcattaggtatatctcccaatgctatccctccccccctccccccaccccacagcagtccccagtgtgatattccccttcctgtgtccatgtgttctcattgttcaattcccacctatgagtgagaatatgcagtgtttggttttttgttcttgcgatagtttactgagaatgatgttttccaatttcatccatgtccctacaaaggacatgaactcatcattttttatggctgcatagtattccatggtgtatatgtgccacgttttcttaatccagtctatcattgttggacatttgggttggttccaagtctttgctattgtgaataatgccgcaataaacatacgtgtgcatgtgtctttatagcagcatgatttatagtcctttgggtatatacccagtaatgggatggctgggtcaaatggtatttccagttctagatccctgaggaatctccacactgacttccacaatggttgaactagtttacagtcccaccaacagtgtaaaagtgttcctatttctccacatcctctccagcacctgttgtttcctgactttttaatgattgccattctaactggtgtgagatggtatgtcattgtggttttgatttgcatttctctgatggccagtgatgatgagcattttttcatgtgttttttggctgcataaatgtcttcttttgagaagtgtctgttcatgtccttcgcccactttttgatggggttgtttgttttttcttgtacatttgtttgagttcattgtagattctggatattagccctttgtcagatgagtaggttgcgaaaattttctccaattttgcaggttgcctgttcactctgatggtagtttcttttgctgtgcagaagctctttagtttaattagatcccatttgtcaattttggcttttgttgccattgcttttggtgttttacacatgaagtccttgcccatgcctatgtcctgaatggtaatgcctaggttttcttctagggtttttatggttttaggtctaacgtttaagtctttaatccatcttgaattgagttttgtataaggtgtaaggaagggatccagtttcagctttctacatatggctagccagttttcccagcaccatttattaaatagggaatcctttccccattgcttgtttttctcaggttggtcaaagatcagatagttgtagatatgcggcgttatttctgagggctctgttctgttccattgatctatatctctgttttggtaccagtaccatgctgttttggttactgtagccttgtagtatagtttgaagtcaggtagtgtgatgcctccagctttgtccttttggcttaggattgacttggcgatgcgggctcttttttggttccatatgaactttaaagtagttttttccaattctgtgaagaaaggcattggtagcttgatggggatggcattgaatctgtaaattaccttgggcagtatggccattttcacgatattgattcttcctacccatgagcatggaatgttcttccatttgtttgtatcctcttttatttccttgagcagtggtttgtagttctccttgaagaggtccttcacatcccttgtaagttggattcctaggtattttattctctttgaagcaattgtgaatgggagttcactcacgatttggctctctgtttgtctgttgttggtgtataagaatgcttgtgatttttgtacattgattttgtatcctgagactttgctgaagttgcttatcagcttaaggagattttgggctgagacaatggggttttctagatatacaattatgtcgtctgcaaacagggacaatttgacttcctcttttcctaattgaataccctttatttccttctcctgcctaattgccctggccagaacttccaacactatgttgaataggagtggtgagagaggccatccctgtcttgtgccagttttcaaagggaatgcttccagtttttgcccattcagtatgatattggctgtgggtttgtcatagatagctcttattattttgaaatacatcccatcaatacctaatttattgagagtttttagcatgaagggttgttgaattttgtcaaaggctttttctgcatctattgagataatcatgtggtttttgtctttggctctgtttatatgctggattagatttattgatttgcgtatattgaagcagccttgcatcccagggatgaagcccacttgatcatggtggataagctttttgatgtgctgctggattccgtttgccagtattttattgaggatttttgcatcaatgttcatcaaggatattggtctaaaattctttttttgttgtgtctctgcctggctttggtatcagaatgatgctggcctcataaaatgagttagggaggattccctctttttctattgattggaatagtttcagaaggaatggtaccagttcctccttgtacctctggtagaattcagctgtgaatccatctggtcctggactctttttggttggtaagctattgattattgccacaatttcagagcctgttattggtctattcagagattcaacttcttcctggtttagtcttgggagagtgtatgtgtcgaggaatttatccatttcctctagattttctagtttatttgcatagaggtgtttgtagtattctctgatggtagtttgtatttctgtgggatcggtggtgatatcccctttatcattttttattgcgtctattagattcttctctctttttttctttattagtcttgctagtggtctatcaattttgttgatcctttcaaaaaaccagctcctggattcattaattttttgaaggtcagttctgctctgatcttagttatttcttgccttctgctagcttttgaatgtgtttgctcttgcttttctagttcttttaattgtgatgttagagtgtcaattttggatctttcctgctttctcttgtgggcatttagtgctataaatttccctctacacactgctttgaatgcgtcccagagattctggtatgttgtgcctttgttctcattggtttcaaagaacatctttatttctgccttcattttgttatgtacccagtagtcattcaggagcaggttgttcagtttccatgcagttgagcggttttgagtgagattcttaatcctgagttctagtttgattgcactgtggtctgagagatagtttgttataatttctcttcttttacatttgctgaggagagctttacttccaagtatgtggtcaattttggaataggtgtggtgtggtgctgaaaaaaatgtatattctgttgatttggggtggagagttctgtagatgtctattaggtctgctcggtgcagagctgagttcaattcctgggtatccttgttgactttctgtctcgttgatctgtctaatgttgacaatggggtgttaaaatctcccattattaatgtgtgggagtctaagtctctttgtaggtcactcaggacttgctttatgaatctgggtgctcctgtattgggtgcatatatatgtaggatagttagctcttcttgttgaattgatccctttaccattatgtaatggccttctttgtctcttttgatctttgttggtttaaagtctgttttatcagagactaggattgcaacccctgcctttttttgttttccatttgcttggtagatcttcctccatccttttattttgagcctatgtgtgtctctgtatgtgagatgggtttcctgaatatagcacactgatgggtcttgactctttatccaatttgccagtctgtgtcttttaattggagcatttagtccatttacatttaaagttaatattgttatgtgtgaatttgatcctgtcattatgatgttagctgattattttgcttgttagttgatgcagtttcttcctagtcgcgatggtctttacattttggcatgattttgcagcggctggtaccggttgttcctttccatgtttagcgcttccttcaggagctcttttagggcaggcctggtggtgacaaaatcgctcagcatttgcttgtctgtaaagtattttatttctccttcgcttatgaagcttagtttggctggatatgaaattctgggttgaaaattcttttctttaagaatgttgaatatcggcccccactctcttctggcttgtagggtttctgccaagagatccgctgttagtctgatgggcttccctttgagggtaacccgacctttctctctggctgcccttaacattttttccttcatttcaactttggtgaatctgacaattatgtgtcttggagttgctcttctcgaggagtatctttgtggcgttctctgtatttcctgaatctgaacgttggcctgccttgctagattggggaagttctcctggataatatcctgcagagtattttccaacttggttccattctccccatcactttcaggtacaccaatcagacgtagatttggtcttttcacatagtcccaaatttcttggaggctttgctcatttctttttattcttttttctctaaacttcccttctcgcttcatttcattcatttcatcttccatcactgataccctttcttccagttgatcccatcggctcctgaggcttctgcattcttcacgtagttctcgagccttggttttcagctccatcagctcctttaagcacttctctgcattggttattctagttatatattcttctaaatttttttcaaagttttcaacttctttacctttggtttgaatgtcctcccgtagctcagagtaatttgatcgtctgaagccttcttctctcagctcgtcaaagtcattctccatccagctttgttccgttgctggtgaggaactgcgttcctttggaggaggagaggcgctctgcattttagagcttccagtttttctgttctgttttttccccatctttgtggttttatctacttttggtctttgatgatggtgatgtacagatgggattttggtgtggatgtcctttctgtttattagttttccttctaacagacaggaccctcagctgcaggtctgttggaataccctgccgtgtgaggtgtcagtgtgcccctgctggggggtgcctcccagttaggctgctcgggggtcaggggtcagggacccacttgaggaggcagtctgcccgttctcagatctgcagctgcgtgctgggagaaccactgctctcttcaaagctgtcagacagggacatttaagtctgcagaggttactgctgtctttttgtttgtctgtgccctgcccccagaggtggagcctacagaggcaggcaggcctccttgagctgtggtgggctccacccagttccagcttcccggctgctttgtttacctaatcaagcctgggcaatggcgggctcccctcccccagcctcgctgctgccttgcagtttgatctcagactgctgtgctagcaatmagcgagactccgtgggcgtaggaccctccgagccaggtgtgggatatagtctcgtggtgcgccgttttttaagcccgtcggaaaagcgcagtattcgggtgggagtgacccgattttccaggtgcgtcygtcacccctttctttgactcggaaagggaactccctgaccccttgcgcttcccaagtgaggcaatgcctcgccctgcttcggctcgcgcacggtgcgcgcacccactgacctgcgcccactgtctggcactccctagagagatgaacccggtacctcagatggaaatgcagaaatcaccgtcttctgcgtcgctcacgctgggagctgtagaccagagctgttcctattcggccatcttggctccttattctcattaccttcttgagttgtggctcagacactacaacagagctcygtcacctctttctaaaagctgggaaatggttattgtcaacgccagccccattttggaggcacctggttgcaggggaccacagctaggtgagtcacaactgggtgtcttcatcagggggtttacaagggaagacagactagtgattttagaacaatcagcaatcagggcacattggcaagcaagcacagagcaagatttattttataaaaaagagcgtttatgtttggttcaaacaaaaatgtgagaacggccgaggctttgtaggagttcaccacgaaaaaggaaattacatggtaaaaaaaaaaaaaagaaaaaaaagaaagataaattctacatttttttctttatataattatttagctggagcaaaagtgaaagtaaaagttggggcaaggaaacacattcagatgtggggaagtgctcccagaacgtgggacagcgagtggcggagtccgattttgaaatgctccagagagaatatgatcttcctggaccccacagtgggatgcaccaccccaaaaaccattggcaaagtttggtgacagaggaatcattttgtttctttttatgcataaagaacacacagaaaggaacacttgctttgaggatcctggtaaatcaggctggtgttctgttggggcagtgcagtttggtacaaggaagtggtcactgctgaccccacggagaggctgggaaaagcgtagatgaggtgactggagaataaaggaggctttttctagctcaaggtttaaaggcagccacagtgtctgtagcagatgaattagtgtgaccttggagatggccccttgacccgaaagtggtaaagaatgccatacttttcattttgcaggacacctccttgggggaggctgggctggtagcatatttctacgggcttatggttctgtggatagaattgtagggctggataaaagcactggctattttgagtttttaagcaatcagggggctattagtggggtggtctttgggaaccaaggccaaatctgcaggacagcagagtaattcagatcatctatattgtatggcttgaaatgggatagaaagccatctttattcattcattcattgcaggcatgaactctttaaacaaatatgagtggcctatttgagatcatgatagaaattgtagggaatagagaagcaaccaagactgaccctataaggagctgtcaccaactccctttgaatcaattttaacttttttcttttttttgggacaaggctttcacccaggatggagtgcagtgatgcaatctcggctcactgcaacctctgccacctgggctcaagccatcctcccacctgagcctctcaagtagctgggaccacaggcgcacatcatcacactcggctactttttgtattttttgtagagatgaggtttcatcatattggcaaggctggtcttgaactcgtgagctcaagcgatttacctgcctcagcctcccaaagtgctgggattataaatgtaagccatcatgcttggcctgaaccaattttaacttttaaaaatcaccttttctttgttatacattcaagaagacactgagatgggcattagactaacatcaagctaagttgcatataatttcataaactctgagctttcttgaatatattttttaatttgtgggaattccttgtacacctgagccccaaagacacagcaaactccagtcatagcttggcaattaaatgaagcaatgaaagagagagaaaaaaaatgataaaaacaagtcattccagttggcagagcctcacagtacagttctcaaagtggctgttcatcagaaatgaagttggcaccatcttagggacattggatcaagtcagtccatttgtgacaaggacaaaaggagtagtagtctttccttttgtgatgtgtgacagcactgctcaccctggaattaatggggtttatataatccagatttgctgatgtcctcagggcctggaaattttccttatttgtgttccaattctaaaggtttcctgagaatattctagaagtagtctttcatggtagccatcaatcctggctactgattgaagtcaactgtagagcttaaaaaatgacagatgtccaccaaaggcctatgaattagaatctgccttaytttattttattttattttttcgagacggagtctcactctgtcacccaagctggggtgcagtggcacgatctcaactcactgcaacctccgcctcccaggttcaagcgattctcctgcctcagcttcctgagtagccaggattacaggcatgcaccaccgcaccagctaatttttgtatttttagtagagacaggatttcaccacgttggccaggctggtctctaattcctgacctcaggtgatccacccacctcggcctcccaaaatgctgggattacaggcttgagccaccacccctggccttattttatttttaattaattgttgagcttgaatattcagtgattgaacagggattaaatatcccagcatatctatggtggaacgctatgctgctgtttaaaactatggtgaaaaagaatttgttgacctgagacaatattcataatgccttgctaagtttttttttttttaaaagagcaggctcaaattcaagaaagagtagcctgtgtataaatgaggtttttgttaaataattgtgtatttatacacattatataaaaggccagaaagaacctcaaaaactgttgacagtgttggcttctgagcaatgatttctgtttgtctttttttttttttttttttaagacagagtctcgctctgttgcccaggctggagtgtagtgacatgatcttggttcactgcaacctccaactcctggattcatccaattctggtgcctcagcctcctgagtagctgggattacgggcatggtcaccatgcccagctaatttttgtatttttagtagagacgggggtttcaccatgttggccaggctggtctcgaactcttggcctcaggtgatccattcgcattggcctcccaaagtgctgggattacaggtgtgagccaccatgcccagccttagttatgtttcataataaaaagaagacactccaaatggaaggttacagctgaccttagggacagtgtcccctttgatgacttgggacctccccttatgggagcagagacagctggccggttgcartgggtctgtaggtcctgaactgaaagtgtgacaggtttctagggcgggactggagtgaaccaaatatcttgataggataaattttgcagaaatattttatacaagtaaaatcaacactgtggactcagctttgatgtttttaaaaaatttttgcatgctaaattaaaaaaaattgtattgccccctgctttattgagacataattgacaagtaaaattgaatatatttaaggtacagaatgtaatgacttgatatacataaacattgcaagatgcttaccacaatcaagttaatgaacgtattcataacctcccacagttacttttggatgtgtgtgtatggtgagaatacttaagttcttctctgttagcaaatttcaagtgtactatacattgttattaactatagtcaccatgctatacattaagtctccagacaaaacagttttaaacacattattctaaagtatccctggagctaacaattatatatgatcccccttatttctcatatttcttttcttttctttcttttcttttcttttgagaggagtctcgctgtgttgcccaggctagagtgcagtggcacgatctcggctcactgcaacctccacctcctggttcaagggattctcctgcctcagcctcccaaatagctgggattacaggtgcctgctgccacacccagctaatttttgtatttttagtaaagatgggatttcaccatgttggtcaggttggtttcaaactcctgaccttaagtgatccacctgcctcggcctccaaagtgctgggattacaggcatgagccaccacacccagcctgtttgtcttttctttagtgtttctctgtggttttggagttttaagcattaatctcacgttacttttgtactgaggaagaatcccctcaataaatattaatgctttccccttcagggacaacatggtgaggagcagcaaagaagaaacgagatacgtgtggctgcttcatttactcattcatgatttttggttagcctttgaaagtttatttttcaattttatttagtcttttttttgtattcataaaggaaaaaaaaagggtcttcagtgcttgtgtgagcctggcacttggttttatgcccttgggctgtaraggtcrgtttctcaagttcaactgctacagttctttttgccttttttttttgagccaggcagggtctgctctgtcacccaggctggagtacggtggtgcgatcacagctcactgcagcctcaacctcccggactcaagtgatcctcccacctcaacctcccgagtatctgggaccataggtgtgcaccaccacatccagttaatttttttatttctggtagagatgggatcttgccatgttgtccaggctggtcttgaactcctgggctcaagcaattctcccacctcgacttcccaaagtgctgggtttacaggcgtgagccactgtgtttggcccaagtgctgcagttcttactctccagctcacagaagaggcaacgaggagcctgttgaaatgcagattctctcccaagaggctctgtgaagtagtcctgggtggggccaggaatttcctattttaaaccagctcctcatgtgattctgagctatctggcacgggtctctgagaacctgtaaatggggcttaaattgctcaaagcctaaagacaatgaaaagtggcagaatgtgaagacccggtttgttggtttcaccctggaatctcaactgagttcccccagaatgtccctggacccatgaccctcagctgaaatgtcttagtttagaatgtgacatgtctaagtgggatgacaatcaaaatagacccagctgggaagttgccagcmtccttgaaggttgttagatgtggcaaacaccttccttccttctttaagggtggtaagaaaacaacagctcaggaagtcataataattctaacagcagcatctacttagcactgtctaagcacttcatgttcatttactcatgtaatcctccccaaacctataggatgcctataggtaaaatcatccccattttacagatgaggaaactgaggtttagagaggtgaatgatcttgcccaagactacatggccaatcagttagcttgcctccaaagaccctgggcttaactgctatattatccaaccccaaactctaccagtggccactgtgcaaattctggctgtgtggctgcctccagggttcaagaatattgaccattgcctggcagcttgctgcttgggggcccctgctgaacattttctggtgtgaaatcattatttaacttcaaccttctaaaactgtgcccttcatggtcccagctagcacaaaggtaaaaacacttgataaaacgcataaaacacagccagcagcgtatttccaaatcacgttgtaagccaggcagcgttctcttgaaacatacatccttgggggcaaagcagttaagagaggttccactgcagtgtgtggactggggtgttcactgaaccagacaaagctgggggttttgggatgccagaggcctgtagtgggaacagctaggggaggactgcagccaatctggatagtggcaacaggacagggaaattgactctagtttttgctcagtagcaaaactgttttgaaagagaatctctcctctacctcacccccaggcatgttttttaagtctttaaaaaatactgttaaagcaaactatatatggatatggcctgaaaaggactccctacttcttcttttttttttttttttgagatgaagtcttgctttgtagcccaggctggagtgcagtggcacgatcttggctcactgcagccttcacctcctgggttcaagagattctcctgcctcagcctcctgagtagctgggattacaggtgtccactaccatgctaagctaatttttcgaatttttatatttttagtagagacagggtttcaccatgttggccaggctggtcacaaactcctgacttcaagtgaactgcccaccttagcctcccaaagtgctgggattacaggcatgagccaccgtgcccggccccggacttcctacttccatatttgagtccttgtggacgaactgcaacctaactttgaaacagattgaaaccctaatttaggattatgacaagattgaaatcctaattgaggagtatgcagctgtaacaattgccgagtcttggccaatcccagcagccttacttcaaccgctcatacactgctgagtgttcacactctgttcaaataaggcaaacgccgagctgtaaccgatccagctgtttcagaatctcacctccgatttctgtacgtcacttcctttttttttttttttttttttataaatttgttcagacccgagtcatccctggagtctcacacttgatcttagccaaaaggccgagaagcgatcatccctggagtctctctgaatctgccgtgatcctgggggctgcccgattcgtgcattgttcattgctcaattaaactcctttaaatttaatttggctgaagtttttcttttaatgatactatgatgtgtcattattatttcrcttttcaaattattcaaaattattttcaattttatggtatggtacataccgtaaaatttctgtactcttttaaagcttacatttcagtggttttcagtatattcacaaggttgtgcaaccatcaccactatctggttctagaacattttcttcacccccaaagaagcttcatacccrttagcggycactttccattccttcttccccacagcccctggcaaattctgacggttttaatggttaaatcttttcaattacatcacaagacaccatggaactcattactctttctggcacatagtaggtacttagtaaattttttttttttgtgataaagctttcaattaagactttctactctttttgctggcatatgtgataattttaaaattatagtccaggtgcggtggctcatgcctgtaatcccagcactttgggaggccaaggtgggttgatcacctgaggttaggagttcgagaccagcctggccaacatggcgaaaccccgtctctactaaaaatacaaaaattagccaggcgtggtggcttgcacctataatcccatctactcgggaggctgaggcaggagaatcacttgaacccggggggaagagtttgcaatgagctgagatcacaccmctgcactctggcttgggtgacagagcgagactccatctcaaaaaaaaaaaaattgtgttaaacatctagaagaagacgacatacagctgagttggattttttccccctcctctcccatttagaaaagtctgaactcagaggtctcatgtcaactggataattgttttattggccttattcttaacttagtktgatttaggaaaagacaaggacatctagagtcatgttgtaatcrcagttctgtgatatttcatgtttttctaactcataaaaatacagtgaggaaatcaacagcttggactgtgggaaaagaagtaaagctgaaactctgatacgcacaggcctgagtatgttgtttacagaatgaaaagcgagtyccacataagctgagacttggcttcagtcatgcctgggaatctacaaactcaatgccctctcactggcagaacataaaagctaaagattacccctaatcccgtggcattttaaaatccatggaatgggctttggtgctcagcaattttcacttaaagtcacacactcttttggaggtacaaatgtttcagttcccccagtagtatctctggtaagacttaccagaatgaatattgatgcagatgaagacacgattgttctgtccagaagtgatcacactccccttcacccccaagttccactttttaaacaattcaaataatggaagctcatgtgacagctttctgctggtaaaccagagaataagattcactgcactggaaaaaaagtggaaaccactcacatatttatcaatggatgcatgagtaaacaatatctggcatatccatacaatggaatattattcagccataaaaaggaatgaagtactgacacatgctaccaccctgaaaagatgatgctggccgggcgcagtggctcacgcctgtaagcccagcactttgggaggccaaggtgggtggatcacctgagatcaggagttcaagaccagcccggccaacatggtgaaaccctgtctctactaaagatacaaaaaaaaaaaaaaaaaaaaaaattagctgaccacggtggcaggcgcctgtgatcccagctacttcaggaggccgaggcaggagartcacttgaacccaggaggcggaggttgcagtgagccgagatcgtgacatggcactscagcctgggtgacgagagcaaaactatggctcaaaaagaaaagaaaagatgatgctgagtgagagaagccagatgacacaaaagtctacttgtatgattccatttatatgacgtgtcagcagaaaaacaaacccgtagagacagaaagcagatgagtggtttccagggtccggggaagggaaaagggaagtgactgctaacgggtaaggcattagctttagttagttgatttctttttggggtgatgaatattctggaattaacggtgatggttgcacaactttgtgactatactaaaaacactaaattgtatagtttcagagagaaattttatagtgtgtaaactacatctcaattaaaaaaaaaaaaagtaaaaagaaaacgctgcataagcctcccgtggggttaaaataagagtaagagaaaaaaacatgacttcattgtgtgggtgcctgtgttgaagatgatttagtagcttctgccgtgaggcatttgctagaataaaatcctttctgccctcatcatygtcagcacactggttcgggcctttagcactcctacctggatcgtggaactaaagaattttagcagctgacaaggaccttaaagattgtagcctaactctctcgcttgtcaggggaggcagctggtgccaggcagaagaagtggcatgtttggagtggcctgcctggtgtctgagccacacctgacacccagtgttctttccactgggcctttattgcaattgttttcctctctctttagtctcttccygctccagtaggattgtacattccactgacctaatcttcccgaaatacagatctcatcacgtcactgccctgctgaaaaaacccacagtggctccccactgccttcaggcccagaccccgggagcctccttcaccttctgtccacttcttggctctcatggcttcctaaacaaactccctttgccactgcagcacatggcgtgtgtcccaatatcacgcttctgggcacatgttgttaatccactttgcatatgtttatgtctttgtggctcagcyagattgcaagtttctcggagaccaggatcatgcctttgacctcctgacacagggcacagtgcaattccttgtacttgttaggggtctggaaatatttgtagattagttgatttcattcacaaccacagctagtcttcacctggtacacctaagaatatcttggaggaggccggttgcggtggctcatgcctgtaatcccagcactttgggaggctgaggtgggcggatcacgaggtcaggagatcgagaccatcctggccaacatggcgaaaccctgtctctactaaaaatacaaaaaaaaaaaaacaaaaaattagctgggcgtggtggcatgcgcgtgtagtcccagctacttgggtggctgagacaggagaatggcttgaaccatggagttggaggttgcagtgagtcgagatcatgccacagcactccagcctggtgacagagtgagactccatctcaaaaaaagaaaaaagaaaaaatcttagaggagttctggcaacaggtcactgttttatgctgcgtctctcatgagtttaacttttgggtgtaatctggacaagaagattctcgaaacctcctatgagattggatttactgtcaaaaaagcaaaacacactgacttcaaaagaaaaaagcaaacattatttttgaaacaaycttttaatttcttatagaagtactgtaatttgtgttcttggagatttagaaaattcagagaaagttccaagaaaataaagaagaaaattgaaagctcccataatcctagcccctaggggctgtctattgataatctttcatttttacagccatttttctatgcacacacaaacaccacatatatattctttacaaaaatgagattccactctgtwtactgttttatatcatgcttttaaattaagataaaaattaaaatttaataggactgcattaagtgggaacaattttgctgctgtcaactcgagagagcattccaatgacacagagaaagagcaactccctatttgttttgcttctttgcaaaacaaacagggtaagaagagttctgagaactaaggggcaaggtgccttcctagctgccgacttgagttgggcgtggagttgcttcatctccttctctgtgtctcctcaccagttctrttgaaggaattggagcttgtacccatgaaggtccttttctagtttttggattttgtaagctttgttttacatttctcccatcccttctttgtgaatatttcagagccctctactcaagagggtaggggatgtggctactttgttccctgttttgttgccagcatggtgcctggcaaagaatagacactcaataaatatttggtaatgaatgaatgggtgagactctcatgagtgatgtcctttgttatggaaatcactaggccacatggtcttcttttggaagcaccaagtaggaattctatatttaggttcttggaattgaaataataacacaagtgacattgtacattaatcaattaatggaatatatgtagctgtggccccatgagggagttcttgttaattccattccacaagtggccagggtccactgcyagcctcatgatcccaggtcccgggtcccctctgctaatcttcacttttgggcaccacggtttctctctggttgggtaagtcattccacgaccagtaaggcaagcttaaggccgaagttttcaaatgtcagtgttcttaagaattgcccaggccttactaatcccattttttttttagatggagtcgcctaagctggagtgcagtgacatgatctcggctcactgtaacctctgtctcccggattcaagcaattctcctgcctcagcctctggagtagctgggattacaggtgtgcaccaccacacctggctaatttttgcatttttggtaaagacagggtctcaccatgttggccaagctagtcttgaactcctgacctcaaatgattcacctgctttggcctcccaaagtgctgggattacaggcatgagccaccacccctggccagtgatccacattttaaataattgcttgctatgatttgaatgcaggtggtctgaaacctatcgagaacactagcttgaaacatttcagattcagtgttttgtaaagcagaggagaggccatgattggccattaggagcttcatcaagcgtcagcttgcccacagctttggtttccagggagactgggaagtaacaatacaatagttcatcttcattatgagtgtaccatgccaagagctttcctaagtgctttacattcattatcctctttaattctcttaagaattgtatgaggtaggtcctattattacctctatcttacaaggaaactgaggatcagacaaggatatctagcttatccatgattaggtagagctgacaatgggattaaataatcaagtcctgctactgccaggttaagaaaacccagctctttgttgttttataacaactgggggaagctggtgtgcatcattggctgataggaagagaaattgaattccacatctatgtcctacttcatgcatggattgctctcaacaaccgtgaaacggaatacaaaacagtgaaacaggtgaaattcacatcttgtctttccgtgtgcatactcttaggaccagccctggccatgttctgtatatgaccactttaacctcaaaactgtactgttaaaactcaacaataagaaaaggaacagtccaggccaggtgtggtggcttacacctgtaatcccatcactttgggaggccaaggctggtggatcacttgagcccaggcatttgagaccagcctaggcaacgtggcaaaaccccgcctctaccaaaaaaaataaaaaataaaaaaacaacaacaaaactccaaatcgtggttgtgtgcacctgtagtcccagctactcaggaggctgaggtgggagaattgcttgggcccaggaggtggaggttgcaatgagctgacatcacaccactgcactccagcctgggcaatagagcaagaccctgtctcaaaaaaaaaaaacaaaaagaaaaagaaaaaatgaaaaggagcagttcaattaaaaaatgggcaaaagacctgaacagacacctcaccaaagaagatatatggataccaaataagcatatgaaaagatgttcaacatcatttattgttagggaattgcaaataaaaatgacaaaagatacaactacatacctattacaagggccaaaatccaaacactgacagcaccaaatgctgacgagaaagtggaacaacaagaactctcattctttgctgctgagaatgcaaaatgatacagacactttggaagacactttggcagtttcttacaaaactaacatactcttaccacatgatccagcaattatactccttgatatttacccaaatgagctgaaaacatatccacacagaaacctacacaggattttataactgctttattcatagttgtcaaaacttggaagcaaccaagatgtcctccagtaggcgaatggaaaaacacactgtggtacatccagacagtggaatattattcagtactaaaaggaaatgagctgtcaagccatgaaaagacatggaggaaatttaaatgcgattatgaagtgaaagaaaccaatctgaaaaggctacgtatgattccaactatatgatattttgaaaaaggcaaaacggtggagatagtggttgacaggggttggagggagggcaggatcaacaggcagagcayggaggatttgtagggacgtcaaactgttctttatggttctgtaatggtggatccatatcatgatacatttgtccaaaccaaagagtatacaacaccgagaatgaactccaatgtaaactacagacattgggtgataatgatgtatcagtgtaggttcactgattgtgacaaagatcatcctctggtgggggacgtccatagtgggggaggtggtgcatgtctgggtgcagtgggcatatgggaagtgtactttctgctcaattttgctgtgaacctaaaactgctctaataattcaagttcattaattcaaaaagaacccctgaattgttttaacagggatatttgaatattgagtactgaccagatatttactgatattaagaaattgttggccaggtgtggtggctcacacctgtaatcccagcactttgggaggccaaggcaggtggatcacctgaggtcaggagtttgagaccagcctggccaacagggtgaaaccctgtctctactaaaaataacaaaaattagctgggcattttggtgcatgcctgtagtcccagctatttgggaggctaaggcaggagaactgctcgaacccaggaggtggaggttgcagtgagccaagatcatgccattgcactccagcctgggcaacagagcgagactccatgtcaaaaaaatagaaaaaaaaaaaaaaaaaagaaattgttggggttttttttcaggtgtgatactggtattgtggttatgtttttaaaaagtctttatgtttttagctgggtgcggtggctcaggactgtaattccagctacatgagaggattgcytgaggccaggagtttgagaccagcctgaacaacatagtgagtacctgtctctaaaaaaaaaaaaaaaaaaaaaaaaaaagtctttatattttaragttatatactgtaatatgtatgaatgaaatgctatgaggttttagatttgtttcaaaacactccaatgtgtgtgtgttgggaggaagtagataaaacagggctggtgataggatgataattgttgaagctagctgatgagcacatagagcttgattacactattacttcaagtttgtacatgtttggacatttccataatgtaaaaacacaattacatgcttcaagtctcaatccctaggtctcttacactctgggaatggatttaataaatttagcaaatgcacctgaggttaataatggatttatacattgctgtggctacagaacatttacattttgacacaggtcttcaatatcttaatctaaataagcaaatattgtggaaatttcagacattaccccaatctgacagggcaaatatttttattagttctaactttccccttccctaatttacttatgtatagaattggtcctcatccctgactgtggggagacttttgatagttattaccttttctttctttctctttctttctttctttctttcctttctttctttctttctttcttyttctttctttctttctttctttcyttycttccttccttccttccttyctctctctctctctctctctctctttctttcttcttttttgagacagagtttcactctgtcacccaggctggagtgcagtggcgccatctcagctcactgcaacctccccctgctgggttcaaacaattctcctgcctcagcctcccgagtagctgggattacaggtgatgcctggcgaatttttgtatctgtagtagagacggagtttcaccctgttggtcaggctggtctcgaattcctgacctcaggtgatttgcccgcctcggcctcccaaagtgctgggattataggagtgagccaccacctccggccaactattaccttttctaagaatgctttatgacatcatggcatttcaaattgtgtaacattcagaacgttttctgttgtatcctttcctaggtcttcattactttcctgggacttgacagggcatattgaatctatcctgtaatgcatgggaataaataaggattccaaaacgtgaattggatttagttaatttttgtttctccatgtctccatacacacaggcagcatgagtgagcatctagtatgtattggatatgtgctgggttgataccataaagagatttataaaatggtgccgactttgaggggttcacactctgggggaaagactgtgctgtctaagtgaataaatttggagattgagggcttcatggagaggaggaaagttgtgctttataacatcatggcatatttgcatgagccatgcaaataagaagctcatcacccacccgatttatgtcagaatcagaacccaaagccagggacccaccaaccaactgttcggcccagcacagtttccctgtggcaattccacttctttttttcttatcttacgtcgcagtgtactttgtctcttgtaactcctgcaggatttttcttaaagccttacatggtgctgttatcacgtggcacaaaatgaagccgacctctttgtgtgtgggaatagagggagcattacactgctgggatgcaacagatggagggtggaaagctgtccagcaccttgtctcttccaagatacatagcccaggggtattcccattcctccacgacacaaatgacaacttccttgagctctgatggcttgccaggtggctgatggcgtggagaaccttgctcatgtttacctgttcttgcatccattactcacctctgcccacgtgcccccacacttgcacacaaagccacagagtggcttaaaaaaaaaaaatgaaaagcctccccccaaccctattgtaaaatgtcaagtgtttcagttttgagaaaaaagaaagctgaagaaaccatgactcatgacatgggctgacaaacaacgatctgaaggtatgctggtgagtcacactgtggagctctgcctttgtgttgtggtgagggccggggctggaaggagtgtcatgggaccagccagtaaaattccactactctccgaagccgattgggaggcaatttaaaaaccctgggctttttccagccccagtgtagtggatgactctgggtcccctcaggtatgtcgatctgtatgggaaatcaggaagaatgattattaataactggaaaaaaaaaacctgttagtatctttccatgcccaatgccatgctgaaccagccctgcctgcttctgcaagccagcgaggctgctggattttctcgaagggtattgagttgctaagcaacagcactggcggcgcctatcatgcccagcgatgtcaatgcctgagtgtggcctgcagagcacatttgctcccctccccctcgcctcctctcgaccccttccccccactacatgagaacattaatttgcatctcagggacaggagctgtgccaggtgattctgtgtataaaacagcgcagtgcagcccctgaagcacaaatattgttttgggttgcaaggcggtgcatgtgacgtagttgaaaatacagactcatttgtgtatactccccacgtaaggagggtaggcttcatctaaaagcctgcgtgtcaaatactcctttctaatacatcctggtgtgctctgccttgaagtgtktttttcctgtctgcccatccagcatcttatttatgccccattctgtccctctctctcgttgcctttgttctgtggtctcctgggtgatggagttattgtttgtgtgtagggatgtgtggataaaagggagctgatttctagaggtgagatggccctgtggttaacggttggaggctgctgttgacaaggcctgttgctgtggcagttttgctccggaagtggccattttctgggcagggctccaccagagcaccatctgtctgtgccttttacttcctgtcaagaggcagcaggcttcgtgagctggggaagtgccagaagcagccttcgaattagacagacctggacccaaaccctttctcttcccccmrcccattttggcatcttggcacgagactgtccccatttctggaaagggtgttcacaagaacagtctggctgggttgttgggatgaccgagtgtgatcatgcgtctctatggctggccatggtgtttattcgatggcaggtattaccaggatggagcgagtcccagtaggaagggcctttaggatgtcatctggttccacccaacagggatgggaactgtaattccccactctccctgtggagaatcagggcgggctccggatggatggccaaaggctgcacagaggtgagcctccagggttgggttctaagcgctgttcacactcctgtcccagtggtgtttggtctggggcacattgtgatatgtgtttccctcctttcttaaaattagctcttggcttcagggccttgtagtggactgatgtccctccttaactgaacagtcagtctgcttatttttttggggtggtttaggggtaaaaataagtagataactgaacaaagctggctggcaggaaccttcggctgaccgcagggctttggyggtggtcaagacctggaattggatttgaggcctggccagcgtgaaggatatgccataggagcccaggaggatgactctgccaggcctgcttttgacatgtctgtcatgcttcatgctttatgctgctctgggccattaagcaagaactaaatctgatgcccmatcaaggctgagctctttttttttttgagacactgtctcactctcttgcccaggctgtagtgcagtagtgtgatcatggctcactgcagcctcagtctcctggactcaagtgatcctcccacctcagccttctgagtagctgggagtacaggtgagtcaggtgagtcccaccayacccggctaattttttttttttttttggtagagatggggtttcactgtgttacccaggctggtctcaaactcctgggctgaagaccatccactcgcctcagcctcccagtgttgggactataggcgtgagccactcatctagtctaggccgagctcctaaacaggaaatgtgtggcatggcttctttgaaggtggctttctcattctgagttttaaaccacaaccactgaagatggttagtgcctgcagaatgcgtaccatttccactcagagaaaccattcctccttaaggaaagctggggccgttcctggtctggcgttcccagtgaaggaagaaccaagtggatgcccctcaaccccagcccgaggcagctgtgtcgttatggtccagctgggcaccccactctttaggaggtggagagggaaacagggggattggtctaggtttgtgtgggtcagagccaggtgagaagttatagtagttgctgggcaaagtaaatargaaggagacagaaaggcccaggcacgcagragaccccagctaaaagggcagggagagggacacgttggtggtcaagaagagggaaatgaggaggggcttttggagatcccgccaaagaggtgttctgtgaaccmctccygctgacacacctactgaagggtccactgagacagcaaagcaggaagggtggaaagggtcygccaggggcagtgcctgacatgtgctagaggtgacgtagaatctgggatcagcgacaaaagatcacacctagaaccgtggtcaaggatgtgagccagattttctggggctcagtcctgggtttgtcacttaactgtgtcacttggagcaagtcacatacctctggcagtctcagttgctcatcagaaaaatgggaattttatatatatatataaaaaatataattatatatttatttataatatgtgtatatataattatatgattataataatcacaaatgggattatatataatatataattatacattaatttataatatatatttatttataatatatgtgtgtatatatacgcatatatacatatgtatgtatgtctatatctctatctttcgggttgttttgagaattaaatgacctaacccatgtaaagccctgtgtaccgtgcctggcatgtaggatacttcatcactgtcacctgtttttgttgttatgacctgagcatctccctgttcaccagcccttgttctttagccacaggttgaagatgacagtagatcctaaggaacctcagttctatcccgaaatgcgaaggcctttttactcaaccacaaagaagtggtcagcagaaaactggtcatcccggcctctggggccatgcacagcactcaggaggagctactattttccctgcctgtttacatgcggcctggggccttgtgggctatttgaaaattaggacacgagaagtccaagcagcacctrgtaattaaactgagtcctctatcagagagaggcgtgaccttgaagggcatccatacaggagccaggggcaaagcagaaggtgggagggattctccaggcttgaccctctcagcacatctcagtcaggggtgcctggcagcctagattccagccctgcccagtgccacccagagacctgagggaggtggacagctgctcagctgggtgatgggagcctctagaaatagttgtcaacctcatcaaaccagagatgagcccttaggacagccagggtgttgatttccagccaggcagggcattggttctccagtgggatgtggacaaggttcactgcagcctctcagcagatgaactaggggagagacactaccccaaccatgctcccccgacccttcggtgttaagtgaaagtatcttccttttttctctctgctctctccgctttacaacaaaatattatctttagtctgcaaaaccagggccaggaagaatcttcacagctagacagggccatggaaagatgatgaggcatatcaggaactatgtaatcttgtaatacttctgctgcaaaacctcctgacgttctgaatgaacagtcacatgcagcctcttcagtgcaaaactgagctcataagaaagtaaagcaaatctgtaggggccaaatgaagagtgaactggaagtcagagcttcaagtacatgactgatgtggtgtatcccttggggatgggggtgtacacgctggttttgggaagcagggcacttgggtttgaaagttcatccaggacatttgtgtgactctcagtttttgaatattggtgaatagtgctgcttagaacattctggtatgtgagtttttgttgcacataaggtatttatgttgracaaatatttaagagaaaaattattgaatttaggtatgtataacctcasatttggagaatactgctaaacagtttttcaaagttgytgttcattttaaataacagcatatgggccaggmactattgctcatgcctgtaatcccaacactttgggaagccaaggcaggaggattgcttgaggccagaagtttgagaccagcctgggcaatatagtgagaccccatcgctacaaaaaattaaaatattagctgggcatggtggcgtgcacctgtagttccagctactcaggaagctgtgataggaggatcacttgagtccaggaaatggaggctgcagtgagctttgatcgcgccaatgcactccagcctaggcaacaaagtgagaccatgtatcaaaaaaaaaaaaaaaaaaaaaagtccaacagcaatgacaacagtgtaggagcattctaattgctccacatcctcaatttgtattgtcttttcctcaggcttattttaatcactctggttggatttgcatttctttctttcttttttttttttcttgagatggagtctcactctgtcaccaggttggagtgcagtggcatgatctcagctcactgcaacctccgcctcccaggttcaagcagttctcttgcctcagcctgctgagtagctgggactacaggtgtgtgctaccatgcccagctaatttttgtatttttagtagagatggggtttcaccatgttggccaggatggtctcgatctcttgattgagattgtgatctgcccacctcggcctcccaaagtgctgggattacaggtgtgagccactgtgcctgaccttggatttgcatttctaggatgatgaatgagagtgtactttctcatatgtattgtggcaatttgatacctgcttttatgaagtgtttgttcaagtattttgctcattttttctattgggtcatctgtatttttcttactgatttacagtttatacttgatttatagatttgtttgaaatataaatcctggtgaccataaatatattgcaaatatcttctcccattctttagcttgccttttcactctttttttttcttcctttattgagacggcgtctcactctgttgcccaggctggagtgcaatggcgagatctcggctcactgcaaccactgcctcttggrttcaagcgattctcctgcttcagcctcctgagtagctgggattacaggcgcccgcmaccatgcctggctaattttttgtatttttagtagasacggggtttcaccatgttggccagactggtctaaactcctgacctcagatgatccactcacctcggcctcccaaagttctgggattacaggcatgagccaccacgcccggcctcgttctcttaatggtgtttttgataagcagatgtccttgattttattaaagttcaagtctcttattttttccttatagttattactttgtgagacctacttaagaaatattgcttagtccaaaataatatattttcctgtgatttcttttagaagctttatttttatatttttcaaatttagagctacaatccaatccatcttgaattctttttttgtatatatagttttaaaaaaatatatagaggttggtattaatttttttacatctagatagccaactgacccaacactatttattgaaaataatattatttctcttgtgttacattgtcaccattgctgtaaatcaagagaccgtatatctataggtcagtttctggatcctggattctgttccaatggtctatttgtttatccttgtgacattatcttactgtataccattacttcattctataatgagtcttgatatcaaatagggaaagtcttccaactttgtttttctttaagattgtcttggttctttttgccccttaacattttcatataaaatttagaatgagcttgtcaatttccatgcacgctcacaataaacccgctgggatttttattagaattacacagaaactctagatatgccagattgtagagagtttatatctttataatattgaatcttccaatattgaatggtagagctcttacacaacttccattatgttaatacctaggtttgtgattttttggatgctactatttattagtctgttcaggctgccataacaaaataacatagactgggtagcttaaaaaacagaaattgatttctcacaattctggtggttgggaagttcaaaatgaaggtaccagccaatttggttcctagtgagcatttttcctggtgtaggagatggttattcttctaggtgggcaccatcttgctatgtgttcacatgatctcttctttgtgggtgtgtcgcaagagatagcaagtgagcaagctccctggtgtctcttcttataagggcactaattccatcatgaaaggcccaccttcatggcctcatgtaaccttaattacttccccaaagccccattttcaaatacaatatattgggggttagggcttcaacatgtgaattttggagggacataaacattcagtacgtaacatactataaattcttcatgtaggttcaaggttcaaatgtatattacccatttggtctgggaattcttaagataaaagattaatatagaagtggtatcaagcagtgatggtatccctgcaatgtctgtcagaagcaataaaaaatcttctctggaggaacattccctcaattcaggcagttgaagattgctacaaacagagtcctactaaatataagttcacaatccaattacaaaacatacgaggaatcaatttaccatgagcaagagtcagccgaccaagcaactgatggattatgtttcaagaacttaagataatagaactatcaaatatactataaaataaatatatttaaaattattaaagacttaaaaaggaattgaaaattgataaagagaataagactattaaaaggaggaggcagatttgaaaaagaataatattaataaaaatgaaaagtatatagtcattaaaattaaaaactcaatggacagattagagacagctgaargggaattagggacttggaaggyacaggaaatttcacagaaagcagtttagagagattaagagatggaaaatatgaaagagagattaagagacaagtaggacagaatgagaaattctaatatacatgtaatggggtttccagaaggtaagaagatagataatggggtcgggcatggtggctcatgcctrtaatcccagcactttgggaggccaaggtgggtggatcacttgaggtcaagtgttcaagaccagtgtgggcaacatggtgaaaccccatctctacttaaaaaatatacaaaattagccagttgtggtggtgggagcctataatcccagctactcaggaggctgaggcaggagaatcacttgaacccaggagatggaggttgcagtgagttaagattgtgccattgcacttcagcctgggtgacagacgagattctgtctcaaaaaaaaaaaaaaaaaaaaaggtaatggggaagaggcagcagtcaaagtgaaactggctaaaaattttttagaattggtttaagacttaaatcctaaaaatcaatcagtctgattactcttgagcagaattaaaaaaatatatatgtatagtttagaggataaaggaggaatcagtaaaactcaaacaatccaagagacagagaaaagaaacaaagaaaagacagagtaagtaggaagtataaaataaagcaatggtaataaaactaaatatatgagtaatcataatgcatataaatagaataaattattcagttaaaagacagaagctaggtgtggtggctcatggcttgaagtctcagctacttgggaggatggtgtgggaggactgcttgagtctaggagtttgagaccagcctgggcaccacagttagaccctgtctaaaaaaaaaaaaaaagdgattgttagaataggttaaacacacacacacacacacacacacacacacacacacacacgcacatgcagtctagtattctagtatgcctcttgtttagagagtgacgcagaaaggtagaaaatacacaccaggggaatactaatcaaaagaaaactagttcggctatagtaataacagacaaaatggactttttaatacatgtataaaaacactttaaagagaaaaatagtcactacatatgataaaaggaacagttcattaagatacattcacctccattgacctagcaagatcaccttaaaacatatgtagcaaaattttacaaaattaggaggaaaaatagacaaatccatacttgtagtgagagattttaacatacctctcatagtaattgataaaccaagaagacagagaattagtatgattatggaacatataaacaatataagaagcttgaacaataattatatgtgtaattttacactcaacaatcagagaataggccgggtgcagtggctcatgcttgtaatcccagcactttgggaggctgaggtgggtggatcatttgaggtcaggagttccagaccagcctggccaacatggcaaaactccgggtctactaaaaatacaaaaattagctgggcatggtggcgggcacctgtaatctcagctactcaggaggctgaggcatgagaatcgcttgaacccgggaggtggaggttgtagtgagccgagatcatgtcactgtactccagcctgggcaacagagcgagacttcgtctcaaacaacaaccaccccgccccccactgaaaaaagttagagaatatacattctttctaagcagatacagaaaatatacagattttgaccatgtactggatatttatatcatgaagctatttatgtaaagcttaaaaacccataaaactatactataccatattcatggatcttcataaaaaacataaaatacatgggggcaatagatcctacattcaggctgtaggtttttctgcagttggaaggaggaaaaggggatgggggagggacatattaggggcctcagcggtatatgtagtgcttaaaacaaccttaaataagagatcagcttcctgtcctgatccagaaggagtctaacctctaagcctctctctctcccactgattataactaaaacttttaaaagcagaaaatacttaagacttggaaaagtcatagcatgcagactgaggaagggagtcaaaacttgaagaatgaattgttcagagctgaatttctcattttcccccattctatttcccaactttgatctgagggcagcctagttgtggacctaaaatcctgagaaaaaccctrtatttctggccagaggactgagaaaatggatccctgggaactagataatagggcagcagtccccaacctttttggcactggggaccagtttcatggaagaaaatttgtccatggacctgggtagggggatggtttcaggatgattcaagtgcgttacatttattgtgcccttttatttctattgttattacattgtaacatataatgaagtaattatgcaactcaccataaggtagaatcagtgggagtgctgagctcgttttcctgcaactagacggtcccatctgggggtgatgggagacagtgacagatcatcaggcatttgattatcataaagagcatgcaacctagatcccttgcatgcacagttcacaacagagtttgygctcctataagaatctgatggctctgctgatttgacaggggatcaggcagtaatgggagagatggggactggctgtaaatacagataaagcttcactcgcttgcttacagctcaccttctgttgtgtagacctgtaatggtccatggcccagggactgggggctcctggagtaggggaaatgctggagaagagggattccttagttctgtgtatggaccaacacaaatcttgrgctcagcctcaagttgtatatacccaggacagacctaaaagtactactgcaaagattttcacaactgacctgacactagaaccctgcaaacagaaggcaagacagaacctgtgatctgaacacaacagggttaatggcctgctaaacaaatcgaaaccaacattctctagaagttttacaaggagaatctagaatttcatggaataatattagaaatgtacaagatacaatccaaacttacttgacacataaagaaccaggaaaatgtgattattttttaaaggaaaaggcaatcgattatgttaatcctgagatggcccagatgctgaagttatcagacaaatactttacttgttataaccaagcccatgaggtaaaggtaaacaccttaaartggaaagaaaaaagtgtttggcaaagaaatagaaactattataaaagaatacaatacaacttttgaaaatgaaaattgtaatatctgaaaaacaaaactcattgaatgggcttaatagcagaatggagatggcagaggagtcagtgaacttgaagatgtatctataaaaattatctggtctcaaggacagagagaaaaaatgattgaaaaaaattaatagaatctcagtggcctgtggtacaagaccaaaaggtctgacattcttgttcttgtagcaccaaaaggaaagagaaaagagactggattatgaaaaaaatatatatttgaagaattaatagctgaaaatgtcttacatttcggaaaaacatacatttgtagatttaagaagctcagcaagtctcaaacagaataaaccaaaaggaaatcatgtccagatgcatcacacactgttgaaaaccagatataattgaaaaatcttgaaagcagccagaaataagtaacacattatatataggggaacaaggattcatatgactgagtatttctcaccagaaaccatggaggctagaagacagtagaataacatttttaaagtgcttaaagaaaggagcttttaacccagaattctatattcagaaaaaatatccttcaggaatgatggtaaaataaatacattctcagattaagaaaaagtgagagaattctttggtattaaacctgctctaaaataaatgctaaagagagtcttacaggctgaaggtaaatgataccagagggaaacttgaaacttcaggaatgaaggaagagcaacagaaatggtaaatattgagctaaataaaataccctatttttatccttttaaattctttaaatatttatggctgttgaaggcaaaaatcataacattggtgaggttctcaatgtatatagatataaacatatgacaggtataacataaagggggagggtaaaagtatgtatatgtttgtcaggctcctacattttactttgaattggtaaaatagtaacttgaagtagactgtaaaacactaggaatgcatattgcaatatctagaacagtcactrtacacacacacacacacacaaagagatattgccaaaaaaggcaacagatacattaaaatgaaatactaaaaactttaagtaattcaaaagaaggcaggaacaatggaacagaaccaaaacacacagaggacaaacagaaaccacataatacaataatagacataaattcaaccataccaataattacattaaatgtaaatgagctaaacataccactaaaaaaacagagattgtcagattggataaaaaagaagactcaaatataagctgtctacaaaaagctaatttaaatatgacataggttaaaaaaggaaacaatataaagcaaatatgatgaaatgatagaaccaagtggtagatacctgtgagttaattctgttacttgctattatattctatatgtttgaaatatttataataataataaaaggtgattggatgattttttacataaatattctagtcctctagggaggaaaaaggaaagattggttaatagatacaagttacagtaagatgggagggataagttctagtgttctacggcattttagggtgaatatggttaacaataattaaatgtacatgttcaaaaagctggaagagaggtttttttttttttgagatagagtcttaccctgtcacccaggctggagtgaagtggagtgatctcagcttactgcaacctctgcctcctgagtttaagcaattcttgtgcctcagcctcttgtgcctctgcagctctgtagcgattctttttttttttattttttgagacagagtcttgctctgttgcccaggctggagtgcagtggcatgatcttggctcactgcaatctccacctcctgggttcaagagattcccgtgtctcagcctcctgagtagctgagactgcaggcttgcaccaccatgcctggctaattttttgtatttcaatagagacaggtttcaccatgttggccaggatggtcttgatctcctgaccttgtgagctcctgacctcgtgatctcccacctcggcctcccaaagtgctgggattataggcatgagccactgtgctcagcctaaaagagaggattttgattgtctgcaacacaaaaaaatgataaatgtttgaggtgatggatatgctaattaccctgattggatcattatacattgtacacatrtatcaaaatatcactctgtgtcccataaatatgtacaattattgcatatcaactaaaaataaaaagaatcaatgccctttagatgggtatatgagatctttagatgcctggctccagactgatgtctcatctttttccttctagtccctggtgtggggccagagcttaggatctggaatcagacttcttaaacccaaattctacttcttacctggtaatcacgtccaaaggactttaactttcttaaacctcagaagacttcaacagtaaaataattataacattgcctaactctaagggtttattttgaggaataaatgtaatattgtacctaagtaatggcaaaatgcttggcacataggacttgtttaatgaacatgagctgttattagctagactgattcacctggctggagtcactgattccactgtaggtcatcctagttccctgccttttactaccaacgaaacacagattgcaacacattaatggctggtgaaatcaatagtttattgtgaccagcattaaaaaaaaaaattgtaggctgggcacggtggctcacgcttgtaatcccagcactttgggaggccaaagcaggcggatcatgaggtcaggagatcgagaccatcctggctaacacggtgaaaccccgtctctactaaaaatataaaacattagctgggcatggtggtggaagcctgtagtcccagctactcgggaggctgaggcaggagaatggcgtgaacccaggaggtggagcttgcagtgagctgagatcgcaccactgcactccagcctgggcgacagagggagactccgtctcaaaaaaaaaaaaaaagaaaaaaaaaaagtgtaattaaatgatgcacaacagaatagaatgggttggaatttaatagaactgaaaagaacagaataggatagcatttttaaaaagtgaattgtgtatagttaggataatgattgtttcagtgtgtgggtataaaacatatttattattgtgggttttggccaaaagaagcttgagaaacacgggtttccatgattccttttgcctggagtactgaagcttagtgccgccctccaatggattttcaacagcctgttggagccccacttccttgaaaagttttcacatgattttctttagccagagtgcaaaacctgtggaagccatgggtacgttttaaacaagggagtgatgagatgtgatttacattctaagaacaggcgctcctgtgaagaggaagcctcaggagggagtgagagcagaagggagcccacctgtggttgtctcagcaacagcagaagaacctgggccgctgggagtggagttggagagaaacaggttgatttggaagttcttctgcaggtagaacggaaaggcgaattctgcaagatgctctggggtccactgagctcagctgctkaggctcagctctttctgtggcttcttcttgagcagcctgttgaccaagatgtggcccatgccactccctatattcggagtccattttctgatgccctctytcagctyttcgcctgcactcatctgtgactgcctggtactgctaggaagcctctgtttgtgtctcatctctccaggtggactggagctcctgggggtcctttcctttgtgggggttctcaatatcagaatggagtcgcttatgtcaaaccctaacaaaatggaggtggaggtcacgaattggagcctatatgcgtgcctgtaacaggacttgtcacaaggaatccctgcacatatgtgtatgatggggactatgccaggaactcctcacatatggaggattcgaggtaagccatttgctcaaggacacttacccagcaatggcagcctccactaatgagacatcgcsaactcctgtaatcaatggtctttgtttctaaacagcttatgtggaattctccgtttttttgtctgtaaaagttttctttagccccaatctctttggatatgcctatgattcatcatagcacatgtttcccaggttgcaatcccctgcaattcccaaataagctccttttgtggagatcctgtctctctctgtcattatttaggttgacaccttttatgtcctgcattgctgttgatgacacccacatttgtacctcctgcttgaatgtcccctcccccaactccaaaattcctctctctgtctaccctgtacctctatttgaaccactaagaggcatctcagacttaaagtgtcccaaactgagcccctgtgatgcccccagagctgctcctccccaccacctcctcctcagcaatggcagcttgattcttctttgggctttattcagtcccccaactttggagctttcttgacccctctctattgctcacatgccatattcaatgtgtaggcaaatcctttggccctgccttccaaagacatgcagaatctactcacttctcgccacctcgctgtctcactctgcgtcaggccaccctgtgtgtccttgcacaattgcgggagccttggctcgagtcctccagaccttctacctctttgacttcatctagtgctgctccaagccccgtgctcttccttggacacaccaggcatgctgccagcagagcctttgcatgtgctgttccctttgtcgggaagccttttccccagctatctgctcagctcatccgctgtctctttcgtcctcgctcagattccccttctctgtgaagcctttctgaccatcctcattaaaatcaaataaccccacccctccactctcttgcccattttcctcatccatttccccctaggactaatcactctctaacattctctatatatttttctgatatatttgtttatatgtcttgcataaacaaaatgatttggtttatggtctatctcttcttgctagaatgtgagctctacaagggtagggatgcttattttgtcaccgttgtgtccctgactcctaaaatgctgacggtgtggccagctgcatgccctgctgtctctattttgaaactctaacaaaattttggacaagaccctcctctttcattttatgctggacctggaaaattacagagcaggttctgacttccaggcacatggtacgcattcaataaataatctcttgaatgaatgttgaatgtagtggttttcaaagcagatgggagataagaggttactgagtggttgactgaatggagggagggctgatcattcattcattcacgcattcattcattcactaacattcaacaaatatttacctgacatccttagggattaaatttctgtccactgatagtgaacctcatgcatcatgttgcacagtccatagatgtgagggattttacgaacacaacaccctgtgatgtaggtatgattgtctccacttccagatgaggatactgagaagttaaggcattgcctgaggtcatgtggctagtggaagccacaggcaggattatcccatggctggccaggctgagctgtaggggcagctcctgtactctcagcctcctccttcagaatccctcctcctcactccccattcgtgggctgcttctcccaggatcaggcagcctctgcccaccttttctcacttcaccctttctccttgcagaattagaaagaatcggctccagctatttgtttcttactgtggatttatccatgtgtcacctctcccaggcagaattacattctgaaggcatctctaattgagattgctccatggggaaggactcttagggctcagraagcaggtggtaaagccctggagtgaggcaggaaccccaaagccctatgacaccccatataggtacccccaaacctgcctatacttcaggccaggcccccagtatagagatgraaaaatagtcccacttttggtcacagattctggaaaactgtgagattctggggaaatccattttgagtaataccttttagaagaagaaaaaaatggaagtagcttatcatagaatgggttttgttagacaaagatggcaattcaggaggaaacataaatttaacaactctcaagtatgcacagctgacatctcgtagagcggggctggtgactaagccagaagttactgtctgcatcctttgtaacttacaaataaaaatgaggaccagacattagttatgaaatgcatgaacaaccactgctctgggagccacataaaaagatggtgattccaaacatttaaccttagcatttgtctgtgtggtttcatttgaaaatgatggggtgcttgaaactctcagaacttagaaaactcttaagtttttttttttttcttaagacagggtcttactctgttgcccaggctggagtgcagtggtgcaatcatagctcactgcagccttgaactcctggcctcaagggatcctcttgaatacctgggattacaggtgcatgccatcgtggccaatttttaaatttttttgtagagacaagggccttactatgttgcccaagctggtcttgaactcctggcctcaagagatactcccaccctagcctcccaaagtgctgggwttacaggtgggagccaccatgcctggtcaaaactctatgcattgaaataacaaatataagaaatagataaaaatataatacataatgaatataataaacaaatataataaatatacaaatatataaatattgtattctatatgtaaactcatgtattttatatatgaatatattatatgcgtaacataatatattgtgtgtgtattatgtgcataacataatatattgtgtgtgtattatgtgcgtaacataatatattgtgtgtattatgtgcgtaacataatatattgtgtgtgtattatgtgcgtagcataatatattgtgtgtgtattatgtgcgtagcataatatattgtgtgtattatgtgcgtaacataatatattgtgtgtgtattatgtgcgtaacatattgtgtgtgtattatgtgcgtaacataatatattgtgtgtattatgtgcgtaacataatatattgtgtgtgtattatgtgcgtaacataatatattgtgtgtgtattatgtgcgtaacataatatgttgtgtgtattatgtgcgtaacataatatattgtgtgtatgtgtgtaacataatatattgtgtgtatattatgtgtgtaacaatatgttgtctgtatattatgtgtgtaacataatatattgtgtgtctattatgtgtgtaacataatatattgtgtgtctattatgtgtgtaacataatatattgtgtgtctattatgtgtgtaacataatatattgtgtgtctattatgtgtgtaacataatatattgtgtgtctattatgtgtgtaacatatattgtgtgtctattatgtgtgtaacataatatattgtatatacatttgaaaatattgtatatataaagtatataacataaaaatcagaaataaacataaggaatgtaagtattgaaattacattgtgagcttgctttttgtactcagaccttccccacagtrttaggatggtttcattggcaaataaaagaaactgaacccaacccagcttaggacttcaggaaaattgattgaatgattgcttgattgcttctatgattgaaaacgctgcctcacctccaggcctccctggcttgatgcccagaggggcaaaaggagcttctcttttctcccagcagtcacatgtcaaatcctagatgagctcaggctggccttacttggacacacgcccctcccttgggcctttgacttagcaggaaggatggggggctaattagccagaacttgagggggccagacactgtgactgaacccccagaatcaataccatcagctttggggagaagcagctcccaggaaaaagaaacagtaattgcctataatcttgcttttctttccatgctgacaagagacattttccctgagactgacagaaagcgctgtgttataaagaactagtcctttctcttagctgttttcataattccaggtgttttctgttccagtcaaaagactcgagaaaagaaaaatttcccaagagagaggatcaacttcttctttattttgggaacagtagctaaaatgtggtctctggacccaggctaacctagatttcaacactgcatctcctgtggagtgtaggaacttgggaatttaggtccagttggccttcactttccctgtttgcaaaacagagataaaattatacccctcttagttttatggtaaggattagataaaataacacgtattaccaaatagcacagttcttggtagattttcttttatttactttctccttcaaatacccactgggtaattttttacccctcgagaagccttggaaaagcagtgatactggatgcattcccttatcttatcacttgtcacattcattatgctgaaatcattcatttaagtgtgactctctcttttattttccatcaggcggcaggttccttgagatccagggccatgtgttatccgttttgatgtccccagtgtcagacttaatgcctgggaacacaataggaattcaaccaatgtggagctgctgaactattgaaccaccagatagagcttttgagggtgaccgatcgttattgcctttagaaaagcaagattggtggttacacccacacagagccaagttagactattttctggaatttgtttaacccagggtatgtatttacctggaccacaaagagaatgttgatgtgaccaagtcatcttataggggaatggcaaggaagggaagaggcaacagggagttacatggctgggttggaatcttaactctcccgcctacttgcttgtggaatctgaagcaagttttttcatctatttctacctcagttttctgatttttaaaatggtacaataataccaactacatgggactattgggataattaaatgagacaatgtatttaaaaagccactgcaggccgggcgtggtggctcatgcctgtaatcccagcactttgggaagccgagcagttggatcacttgaactcaggagttcgagaccagcctgggcaacatgatgaaaccccatctctacaaaaatacaaaaaaattagccgggcatggttggcatttgcctgtagtcccagctactcgggagactgaggtgggagaatcgcttgaacctgggaagcagaggttgcagtgagccaagattgcatcactgaactccagcctgagaccctgtttcaaaaaaaaaaaaaaaaaaaaaaaaaaaaaaaaaaaaaaagccactgccttgaggcatcaacatacaatatggaagagtccctgagctggggccacagggtttgcttggtaggcactgtgtttgtaggagtacagtcttaactgctgtaacaaaggggctccaaagtacagtgacttaccaagagagaagttgatctgtttccatgtcacagtctggaggtcagcaggtcagggctgctggggtagctccacatccttaatacgtgctttccatttctgtgtctaaggagataccctggttcttctcctctccttccagcagtggaaagggggaaagggactgggcacaaggggtcgatgatactaccaattttttgagggcaagatcaggatgtgaccctcatcacttctgctggctttacctcgtcacatgaccatggctactgcaagggagactgggaaatgtagtctttggccaggcagccatgttgccagctaaaatttatactacagaagtatagaaaaacaaaaattgggagacaaccagccacctgccatagccacttaggacctcacgaaaaaaggcaagagtgatagttacctctcaaaagggctctttgctgggttcccttggcagcaagtgcatagtacaaagtctaactccccatgaaccagaagggaattcaggaaatgattcaggctccctggctgactcaaacactcaggatcctggagagaaaagtagccatacacccatttggggcttggggtttagtttataataataataatgactttggcacagaaaacttcctgagggttaatgaatgactggcttggattaatagcccaaatcactgctgaaatctatcaactccttccagcttcatattaatctacaggaaattctttgtataccgagctattacagcttcaatctcacaaaataaaaatgaatggatgtttcattagaacttggaaaaaaacttgatcaccattgtgggtggccaccatgctgttattattttttttccaggcacatttcctgcatttcctccggttctctttctggcttcaatttgctgcagtggcaacagcagcagctggccctctagactaacatctccttgctatttataatacactttgcaatgctcattatttcttaactttgtcttcccagatagactgggagctccatgaggtccgagacaacctgaagacrcccagctcagcagagactggctacggcaatcactcagtaactatttgttgaattggacataatagaagagctgaagaattttaaacaagtcaccatcagtgcagtggattcctcaaagcaaacctggaaatctcggcatgagttggatttaaggcagtacattttcagctcctgaaaatttgaacagtttctcaagagaacaacttgaaacagaaaggcaaggatgtagatgtggttgtagaagatgatgtctgcggccaccaaactgtccactgtgaagacaaaccatgcatgtttagtaggcagtggctcctcttccctgtggggagtcccactgcttccctggcctgggtgttctctgccggtagatgttattgacaaaataagcaaagtcctctgattctgagaattagagttaatgatagctctagattgcctctgccatgctatttaaagtcctgctttattgtctgacatgagttcggcatctatgaggacttgtccagtgcaaagtacaatctccactgaaagatatcaccagcacatcttgtcactgtgctgtagcaagctgggcagtacaatgatgttggcaggatcctgtttaggtggaggatggccacctgggcatcaagaatcttctaccctgattccacattgaytccccaaagtgggcttcagacagctctttacttacgtcttctgattaaagcagcagacagggtcccagctagagaaaagttctgggagcaggagaggtgttggtggctttaaaaccaggggtgaagattgaattaggaggttaggcaggagtaggatcaaagacttagaaaatgcttgtttcctcctattattcttatgagagctgatacggggctttcagttttgggggagagccttggaagagaatgagggaatttaatcaactagcgggacctttccaacttacatttcccagtgtttgttggatgatacgtttgcctaataagttaaagcttccaaaaatagaaagkaaagcttggtgacactaagctctggcatgctgtcatcttctggctaggggtcttgtgcttctgtttttctatttctgaccaaagacataaaatgtgttgtgacctctcaggtaatgctgtggtatcatgtccaagcagtaactaaccagagtggagtttttacaggtaaaaaagtattgaatagctcagcaacagggaggacttaatgataaattgctttttcagaaaatgacaaggggacagacacttgcggttcttccattgagagccttaaggaagttaagcgaagcctctgctcaccccttcaagtaacgatgacccatcagatcgtggtcataaccagtagcatctgaggcacccctaagctctctgggccccagattccttgttaagttaaatgaggtgacttcccagtttaccattctaggggttcctgaggagttaaaaatgaaggagaaaatgcaacatgtaccaagtgagcaagagctcaaggcttatctctggcacgaaagtgaccgctgtccgttagagatgtgattgccctagatttcctttaggaaatgcaaacattgaactctggccttcaggacccaagtcccggcttgcatctattctatacactttctgttatttgttagggctcacaaggaacagttatttatcttttattttctattttttttttagagatggagtctcactctgtctcccaggctggagtgcagtggtgccatctcagctcactgcaacctccacctcccgggttcaagcaattctcctgtctcagcctcctgagtagctgggactacaggcgtgtgccatcatgcccggctaatttttagtatttttagtagaggcagggtttcaccatattggccaggctggtcttgaactcctgatctcaagtgatctaccctccttggcctcccaaactgctggaattacagatgtgagcgaccacacctggcccatttgttttctttcaaacccttctgtaagaccagtgctttaggtgaacacgtggacagaacaagatcatcactattttgcaatatgaagaccaactgcgctgtgaccagaaaaacagaggcaaaatgttgagcttaatgatacctttttataatttgtatttggtgtttctcaattttccattggatagtttgagagataagtacaagtcaatgacatgttctctttcgtaccctattgtctaatcctgctaacacacacacacacacacacacacacactgattacctaatttatctgttccccgattattacactctcaattgctgcagagtctcagaagcagcatggtgtaacagaaagaatatgaggcttrgaatccaaaagccagagtgtgaattccagctccactgacttgctgcgtgacttgaagcaagtcattacgtgtctctgtttactcattttatgactttcctattgcctctgtaatatagcaccacaaacgtgtggacttaaaacaacatgcatttattctcttagcgttctggaggtcaggagtctgacatcaatttcgttgggctaaaatcaagatgttggtaggaccaagatccccgtggaggctctgggagaacccatttccttgcctttgccagcttctaatgctgcattccttgcattccttgattgttgacctcttcccccatcttcaaagccagcagaacagcaccttgtttcattgccttctttactgtcaaatctccctctgccttcttcttataagaacacttgtggttgcatttagaagctgtgataatccagaataatatctttatctcaagatctttgacttggtctcttctgcaaagtctcttttgccacagagggaaatattcacaggtcccaggggtcaggctgtgtacgtctttgggggactttattctgcctaccacactcatcttttttttttttttttttggatggagtcttgctctgtcacccaggctggagtgcagtggcatgatctcggctcactgcaacttctgcctccccagttcaagcaattctcctgcctcaacctcccaagtagctggaattacaggcgcctgccaccacgcccggctactttttgtacttttagtagagatggggtttcactatgttggcctggctggtcttgaactcctgacctcaggtgattcccccaccttggcctcccaaagtgctgagattacagacgtgagccaccatgcccggccccacactcatctattaagtagagctaggaattcctatcctaagggacacaaaaatgaaaaaagataaaatttgtgaagaggcacataatgaaagcccatacatgtcactgagttcagaggagggtgggtctgacctcccattggctggtctctgcctgatggacatcgtgaagaagagagccaggactagtgtggctgggggatgttcaggggccagagtggcttcaggtgccagcagccctggccgaaggatgactccaggagcaaggctcagagccgagtggaagaagcttcataaacgcaactgagccaagcatgatgggatgtgcctgtggttccagctactcaggaggcaggtgggaggatggcttgagtcagaagttcgaggctgcagtgagctatgatcacactactgtactccagcctgggtgacagaatgacaccctgtctctaaaaagaaaaggcacctggatgctcatgaccgagatggggtggggtgggtggggtgggacagccgcactttataactttgctttcagcatgatgtggattagtgtctcccatgtgggaaaattatgtttaccacttagagasctgatagtgcttgcttaccccataacgctggacggtggcaggcttaactcccccatcaagggccttaatgtatttggggccctagtcctagcaacagcagcaaatctcctttttcttttcctcgagctggttgttcaccaggcagttgggatgttaatgggaagagaagacacacacaagtcccttgttttcaataaggcagtctggtcacgtccttagcaggttattaatctttttcaaacccctcctctccaccaagttttatgatcctgggaaggagattcctacctagcatccttagagttatcgggggttaggatcggtgcatgcagtcacttccgtggaatcatcagtagccctccagcctctgggggagagctgccagtggtcagagatgttgggaattacgagggaggagctagggagaaggaactcacagtccctcagtctctgaaggtggctcctggcaggagagggggccagtcctagataagagctctcccagggaattccaagggtcctcccaaggtccagccacaagatgaggaattactgttgggctcttcctcagatgtgcctgtgaattcatatcacagatgcttgatgcatttgacaattgtttaattgcttgagcccaactgatactctttcagtcactttaagggagtgatttcaagtatgatcattgcctcaaatctgtatggctttccttgcctttcaggtgctttaagagggcttatgttctttgactcccctagtaactcaaaagggtggctaagatgcaactctggaggtttccaagctctctgcaaagcctgccttcagtagtctgtgcaccacaagaagcataactttattatcctctagctgaatttacctcctgcttcgagcccctgttttcccatgtcattttaggggtccaatgtttttcctggaggcatatacacacacacacacacacacacacacacacacacacacacacacacacacacatatatacacacacacattccaggggcctctgaggtgccaagacatgtgtggggtccatctggttcacactgatgtccatgatcattgagttcattttttatatcaactatgtgacacttcctatagtttccagttcctggttagaatttgcaaagttgccgactatttctttgaatagagtagctagatcatgggtctacaccagtcatcaagcagcgatttccctgttggaagctccaagcaaattgtcagctccagcattccacacagctgtgggtgccacactccttttccttttaaaagatgatgatctgctagtggtgaatgctcttggagttttatttgtaggtttttcttgttgtcgcaaatgtctatatttcatcttccctcttgagggatattttccatgggtagaggatctaggcttttcttttggattccattgtggctttaaaaaaagtcagttgactgtttatttatggcttctctaaakgtgatctctttcttcctaaggctgytttaaaagtttccgttccctccctcccttcctcccaccccatcccccttcttcctttccttcctccctcccttcctcccttctcttcctccctttctcccttgtcttcctccttttctcccatcctcccttcctccctctttccttcttttttcccttcctcccgccctccttccttcttccatcattatatattaaaatattttctttctttcttttttttttttgagatggagtttcgctcttgttgcccaggctggagtgcaacggtgtgatcttggcttactgcaacctccacctccctggttcaagcgattcacctgcctcagcctccctagtagctgggattacaggtgcccgccaccacacccagctaatttttgtaattgtagtagagatggggtttcaccatgtgggccaggctggtcttgaactcctgaactcaggtaatccacccgccttgtcctcccaaagtgctggaattacaggcatgagccaccactcccagcctattaaaatattttcttctgggccttccctccttttacttcttttgataccgccatcaaatgcatgttaggttgactcactgtgtactctattaccctctcatctggtttttaatctttctgtctccttatactgtaatctcagtgtttcttctgctttaattttggtatatgaattattcagctgtgttcaaagtgtggttaaagcgacttatatgctctttaatttttagttattgtacttttcacctctagaagttcttctgtgacacttcttatagtttccagttcctggttagaatttgcaaacttgttgactatttctttgaaaagagtagctagaattgttttagtctgtgtatagtgagttgaatatctgaaacctctgtgagtctgtttcttttgtctgctagccctactcatggcgtcatgttttcctggatgtttagttggttgtctttgaatatgtccaactccagttatttctgggaatacccaaaggcacacctgttcactatcacccagtgaaytgccatgtgtttgtctcctgtcatggtaacatttgcattcagggagaggcctctgctctctgcagaacagtgtgaaatcacctcatttttgccttcaatgaaggttgtctcttgctggtcaccaccacttcctcaaatgactaatgccactcttgctcacagtgctaaggcgctaaggagttttcagagggctagagtgattctgcatcctctggggttctcaggaaacgaggccacagggccatctgtgcatgagtgacagtggggtggggtggatgagcagtggcagtggtgggcacctatgctgctggcgccacagctttttatatcttggtgaaaacaacgccttgcgttttcacttgtagattctccggctacattccacaagaacaaattctggtcacagaggccagagtagactatcagtgtaatggcccttcccctttgatgatagcagcttttttcgggggagcaggggtggccaaacttcctagccttattttatcttcctttctagttctccccagaggctgctgggtycacctctccctctgccagacagacaggctcagacatgcaagaacggaagggggtgtgggggttggtgggaggattaagttggggaaagccagtcttgtctttgtagattaccagaactgacacacgtacacacacrtacactcactcactcactcactcatctattcatctatttttggcctaagtgcctttggacacttcttcggaaaagcacatgaactcttyggagtctcctgttccacttggtaaatttcctatagccacgcactgaaagtccctgctgccctccttcctctgagcttgtggggcccacagatcccctgctccacttcctgcttcatttcagctgatggtgagtccagggcaggcttgtaggaagggcgggctaggcgtggggaactgcagcacccaccccaccccccgccccagtgcttgttgccccagcctctgtctccctcgctgtgcccttcccttaagccccactcttggcctccccaaagacagagtttgttctgtttttattgataggatgacactccctcgttctaataccatctgaatgcctgagcaattacatcttacaacctcatgaaaaacacagcagcttgtcacgatgaatgatgttaccgtgaataatgcagttttgagttcaaactccttcttattccaagaatgagtaaatatccctattccctcccctccccattgcatttgggtttgacatgacatgaatcattgtggttttactcctgggtagaattgtttttctgtattgcattgccaaytgatggaaggacaaaaaaaggaaacttaccaatgagcagtttcagatgaacttaaattctcagaaatcttgaagaatgaatgaacyataactttctgaagttgcaaaaatgttcaagtcggaagtgacccatgggaagcaacctggtccttaattaggactggaaagaaaacggaggcccagcgagggaacagtggcttccccaaggtcacactgcaagtgagtggtggcactagtcacccaggagtcctcctgactccatggtatcctgaccccagaccagcagccttatttgtggttaaagaacrtggaaaaacagcttatgtttgaattttaaaatcatgccagtactaaagatctgcattccatgaatattgagctttgctgtgtgcgggttgctacgaattttgtaactattttctctaagagctctcagtattttacatatacaattccattctttattgtccagggaaaaagttgcatttactgagcagtaagagggtgatttgaagtccctggggtcccccacccttgtctttctatgtgagattgtattgcagggctcacatttattctctcagcagctcattgcacagacagtgtatttattgagcacctactgtgtgccaggagctatgtggtaagctaagcagacaaaaactcctgctctcacaagaagaaagaataaacaagcagacaattgcacctataatgtcagcctggtgtgatggctcactcctggaatcctagcactttgggaggtgacgatgggaggattgctttaactcgggagttcaagataagcctgggcaaccaagaccctgtctctacaaaaaaatcaaaaaattagctgggggtgatggcatgagtctctggtccctcgggaccagaggcctcgggaggctgaggcgggtttatcacttgagcctgggaggttgaggctgcagtgagctgtgatcacaccactgcactccagcctgggccacagagcgagaccctgtctctaaataaacaaacaacctaatgtcaagttaggaagtgtggcaaaaaggaacaaagtcagggtgactgccattctagaaagggtggtgagggaaggtctccttgagyagaycctgtgggagtggaagggtaagtcacgagactctctggaggaagaagattccaggtggaaatgccttagtgggtgttaaacgctttaacgggtgttagccagaaagccagaatggctggagctgagggagtagaggaggcggcatagaaaatgaggtcagagatggaggcagggccggatcacagaggggcacagagaacgaggagggaattggatttttggaaaagattgtggcaaaatacaaaatataaaatacaaaaataaaatataaaccataaaatgtactacctttaccattttaagtatgcagttcagtagtgttaaatacatttacatcattgttcaacccgtctccagaactctctgcatcttgcaaaattaaaactctatgccatttcaacagttcgcatttcctcttccctctcgttcatggcaaccgccatttttctttctgtctctgtaaatgttagtacttggggtatctcatctaagtggaatcacacagtgtgtgtccttttgtgacagacttatttcactttgcataatgtccttaatattcatccatgttgtagcatgtgtcrgattttccttccttcttaacattgtgtaatattccattgtacgcatagactacatttagcttatctgttcacctgtggatggacacttgggttgctatagtgaataatattgctgtaaatatgggtatacgattatctctttgtgaccctgcttttaattgttttggatatatacccagaaatggaattactgaatcatgtggagattctgtttttgatttatttatttatttttaatttttgagatggagtctcgttctgtcacccaggctggagtgcagtgacacgatctctgctcactgcaacctctgcctccttgcaccattaattctgaaaatgcaggcctggatccaaccgcctttggggacgggtacctgcccacaggaagaggttgaggagacaataatgtcacgagaatcatcatctttgactgggaaatggtgtgcagagtttctggtgccttctgaagtgattgtcgcatctcagcctccctagtagctgggattacaggcatttgccaccaagcccggctaatttttgtatttttagtagagacggggtttcatcatgttggccaggctggtctcaaactcctgacctcaggtgatccacctgcctcagcctcccaaagtgctgggattataggtgtgagccatgcacctggcctgattggttatttaaattctgagatggggtatactaatgtttgaaaaccacagggatgggataggtataggtggggagggagagcaaaagtggtatttagaatatgttacgtttgaaaaacctaatacacattctacatccaagtggacatagatggagttatttgaagctcagaagacacctgagttggagacaggaatttgtggatcatctgatatatttagcatttatagccacagggctgctgcctgactttttttccccctagacagtttcgctcttgttgcccaggcacgaccttgactcactgcaacctctgcctcccgggttcaagcgattctcttgcctcagccccccgagtagctgggattacaggtgtccaccatcacgcccggctaattttagtgcttttaatagagatgggtttcaccatgttggccaggttggtctcaaactcctgacctcaggtgatccacctgccttggcctcccaaagtgctggccaggcatgagccacygcacctggccaccactgcctgtttttgtaccgcttggcaagctaagaatggttttcacatttttrtttcttttttttttggagacggagtctcactctgtcacccaggctggagtgcagtggcacaatctcagctcactacaagctccgcctcccgggttcacgccattctcctgcctcagcctcccgagtagctgggactacagttgcctgccaccacgcccagctaattttttgtatttttagtagagacggggtttcactgtggtctggatctcctgaactcgtgatccgcctgcctcggcctcccaaagtgctgggattacaggcatgagccaccgtgaccggccactgctgcctgtttttgtactgcttggcaagctaagaatggttttcacatatttgaatatttgaaaaaaatttttcaagaataccattttgtggcacacraaaattatatgaaattcaagtttcaatgtccacaaataaagttttataggaacatagcatgctcactcatttaggtattgttacggctgcttccacactacagcagcagggttcagaggtcatggcagagaccacgtggcccacaaaggtgaatgtacttccctttgtagaagctgtttgccaaactcttggctagcagagtgagtcatgagagaagagagaagtgcatggactgaggtctgtccagggcctgtcaagagccagtaaccgttgctgtgcgtcaaggatgccaagatggtgcctgctccaygagcaacaaagcccaggggcccagcaagccaaggctgcttgcctcttcccctggggccagctgtgcatcttgtggatggctgaagttgagcaacccataacaggctcctgacccactgtgagatggtggcwtgtgaaaggaccagcatccaacagtcttgcccttactatattagtaatttcctggggctacaggagctatttactacaaactgagtgacttaaaacaatggaaatggattctctcgcagttctagagggtattattctttcaatcaatcaaggtgacagcagggccatgctcccaaagacagctctaggaaaagctcctggtttctagcggctgcctgcactccttggcattccttggcttacagctgcatcattccagtctctgcttcggtcaccacgtgccttcatccctgggtcgcttccatgtctctatgtccaaatgtcgctcttcttataaggatgttagtcattggatcagggcccaccctaatctggtatgacttcatattaatgtgattgcattgataaagacgctgtttccaaataaagccatcgtcacacgtatggggactaggacttcaacatatctttttgagggacaaaattctactcactatacttccacacacatgcagatttcacgtggttgaatctaagagtatttgggttcttgcgataaaaggatatggcccggtgactaatcctggggaaagaaataaaaagagaaaaaaacctctagtattggtgttaagaccctgagttttacttcatttcctcaccactccctgctgcctgcaggcaggccagctgcctccctaggggcagaattggagaaagaatacgtctctctgatgtaactactgcgctcaggcaacccactgtggagcttcacagtggttctctgccaaagattctgaggtttttagcctgagatgatakgtcaaaaccagggaggtgctcatgggggaaagcagcactggacagagtctagatgctgcttccctcaggctgtgatgaccttcaactggccctcatccccaagaacctcagcttcttcctctgtattaaggaaataaccatagccccgtcygtctgtcacaatgtagaagcggggatgagaagtgaaaagtgaggtcttgcaaaggtctcgcaagtcctctgcaaagctaaggggtattactggacagcgacttggatgaggatggccagacattgtcctccttcaggaccagcttctcagagcagagtctccaaacataatgtcgcttccagatgaygcaaatctgatatcagagaatgactaaaagcttgmaactttgcttttartctgttgtggatcaagtttcttttcaaataaatcaaagtctgtgaacttaggaaggaggaaaattgctggatatcttttttggcggagggatggggggccctctgccaatttaaccatttcaaagtgtccaattccatggttttaagtatactctagttccagaatttgctcatcatcccaaatagaatatctatactcattagcagcctctccctggctcttcacccttctcccgttcctggctaccatgaatctgtgtcygtctgtatagatttgcctattttggatctcttctcttctgttctcttctctttttaaagatggagtgtctcactstgtcacccaggctggagtgcagtggcgtgatctcggctcactgcaacctccacctcctgggttcaagtgattctcctgcctcagcctcctgaatagcagggattacaggtgcctgccaccatgtgcgactaatttttattttctatttttttttttttttagtagagacagggtttcaccatgttgcccaggctggtctcaaactcctggcctcaagtgatccgcccgcctcagcttcccaaagttttgggattacaggcrtgagccatcactcctggccctattttggctatttcayatagtggagtcatacaacatgtggccttttgtgtctggcttctttctgtcagcataatgctctcgggttcacccacgttgtagcatgtatcagtatttcatttcttcttacggctgaatagtgttcagttgtgtgggtttgccatattttgtttattcatttattgatgaacatttgggttgtttccatcttctggctattatgaattgtgctgctatgaactataatgaacattctgcatacatttttgtttgaacatctgctttcagttctttttggtatatacctaggagtggaattgctgggtcaagcggtaattctgtgcttaacttgatgaaccaccgaactgttttccatggtggctgcacctgcatcattttgcattcccaccagtggtgatgaagcttccaatttctcccagatcatgatttaacactcatttttattaaatgcaacaacccytccygcatctggcctgagtgtcctgggccagccaactgcttgctctccatckttcctgtttggtcagaggccctgggtgcagccagtgggttacgcactctgatcccctcagtgacttctcctgggaggtcaccaaggatactcattcagtcaggtcttccagagccacagtgttgatcctgcagtgaggacatgagtgtgcagtgactggactctctcaggcagtcgtggaagcagaggattgctctggccagcctggagacagttcccattggttcctggacttgatctgaatcaactccttcttcctcaccatctcttgcctggtgctgctggctgagrcgttgcayctgtgggggctgtccactcccagctcacgtcttctggcagctccttactctattctaatgygcctagtggtactgccgattttctcttttcccagacacctctctccacactccttctcccacattggcctggccctcatggctctttgatcctcatggaacattctattgtctcctaggtgagaagaaaaggcatcccagcttatattcagacacatggccttgaactcgyaataactcacacatgtaagccacaataacttcatttgcatgcaaccaccttgaatgaatggtctcagtaaatgtgtcatttattctcaatattctggagtgctggaaaaaatggggagtcaaaggatccctcagtctgctggtgtgacctggggcacccatccctgttccctctcctcttacatgggataaaaccccagtggagccgtgtctctggatcactgtgatggattaggtgagtctctacctgggcaccctctttcacgtggcagcatttttatcgctgtgacaacctggagtcaccttgccatttaccacagttgccttggatgaccaagtaaccctcytgcccttcatggggggatgtcctttgaagaacaccattcattctggaagtgcaggcctggcctgaaccactttggggacgggtacctgtcacaggaagaggttgaggagactataatgtcaggagaatcatcatctttgactgggagatggtgtgcagagtttctggcgtctgggggcattccatctgtgaggttttcagttcttcatgagctgttacaggaaacaatgttttcgaaaacaaagttgtccctggcccaggggcgccaggtcattccgtgcaagcagtccccatcagctgagggaaggcccaaaatatgcaagtgcatgagccaggctggcgtggcacgtgaggctgcataattttcgccgcccttccctaggtgttctgctgagagctgggctgtctgcttagaaatcarcctccaggcctgacttttggcctctgccccgcctgtggagtcggtgcgggctccagattccagaggcgaaggatacatcctagtgccagctcagatctgaaacaggcktgcccttcgttttcaggtaacttctgttctggtctctgaggctgtgctggagcactggccgggattccaggcggcattttgtatttggagacagcaatctggggaggggcataaatagtaggaggggcagtgtcatctgtttttaccttttcttttcttcttcttctcttcttctttttttttaatgtagtctggtctttccaactttgtyttcagccartgcagaagatgtctatttgtgctgcacggcccagaagggaactgccagttcagaaaatgtcaggtcaacttgatgctcccggttgacatttggcactggcttgggggagcaggaaggaaggggaggaaaaggacgtggagaagaacctaggaaggattcgtactttcgtgcttttcttcttttctcctctcctcctcttccagtctgctccaggctgacgggaagggaaaggcaagtagctgggtttgatggggccctgcggggaatggggtggagacggggcaggagggggagctgtgtgtctcagaaccactcctgctcctgaccacgctgccccccaacacacaccacaccacacataccacacacataccacacacacaccacaccacacacaccacacaacacaccacccacaccacaccacaaatgacacaccacacaaaccacaccacacacacacaacacacaccacaccatacaacacacacactacacatccataccacactacccacacattacactatgtcacaccacacccacacatcacactacacatacacaccacacacacaccacataacaccacacacacacaccacaacacaccacccacaccacccacaccacacgacacaccacacacaccacaccgcacacacacaccacaccacccacaccacacactacacataccacacatcatccacacaacaccacgcacacataccacaccacacacacaccacccacacacttcacactacactataccacaccacccacatacaccacaacacacacacacaccacacacacacaccacacacacatcacacacaccctcctcacaccatgtacacacacaccacacaccacaccccacacctcacaccctgcaagcctgtgttccgagctcctcagggagtggaggcccctgaggaacagcctgaaccagcatttcccagggttcgcagctccagttccttgcctggcaaattcagtaaatcccaggctgtcacagtttaccacagctgccgtaacaaagcaccatgaagcatgctgcgcctacagagatgtcctgcctcacagttccrgaagccacgtgtcccagatggaggtggcggcagggcgggttcctctraggctgtgagggaggcgctgtcccaggccctccctggcttccgctgggggtgctggccaccctgggcgttccttggcttctagaagcatcgcccagatctctgccttcatcttcacccggggtgctctccccgtgtgtgtctgtgtccacatttcccctttttataaggacaccagtcagactggattgggggcccaccctactcctataccatctcttcttaacttttctctgcaacgaccctgtttccacataaagccacattcagaggtactgagggttagaacttcaaaggatgaatttgggtggtgggggccgcaattcaccccatcacagcaggtgtacatgctccctgcttctggggctccctgccttctggggctttccactctgagatcaaggtgcccaggatgtggagcaggtcaggtgttcagaattaggaggagtgcaaaggtaagcagagacttgtcccttggccctcaagacagaagtggcaattgcccggggccattcagagctgccaaagcattttcctgcttattagccattccarcctcacaactagcaaccttgagagaaargtctggagagaatttttatccccgtatccaaaaagatggagtaacttgtgcaaaaatcacgctgtcagctggagttggaacttgggtcttcaggctctgtgtgtggccctctcaggaggttgaaccagtgatatgggggaggggtatgcacgaaggttctcctgttgcaggggttcggggaaggcattgtgaacgtggtgacatctgaggagggccttgattaaaatttgagggagaagggagctttttggttgcaggcgacagttaagtgcaaagggccaccaactcaaagtgtccctgagtttggggtgctctgaagtggcatcgtcctaatgtacaatgggaggatttggtttttatctgatctctgtcacccgctgacacctttgtctcatccattaccctcagccacacctcatctattcgttagttaattaattaattttttattgagacagggtctcgctctgtcacccaggctggagtgccgaggtgtgactayggctcgctgcaacctccacctcctgggttcaagtgattctcccacctcagtctcctgagtagctgggattacaagtatgcaccaccatgcctggctaatttttgtattttttatagagacgggattttgccatgttgcccaggctggtcttgaacttctgagctcaagcgatcctcccaccttagcctcccaaagtgctgcaattacaggtgcgagccaccacgcctggcccaccccctccrttagaaaatagaaagctcttgctgctttctcttcactggggccaacagaacctcctcgtctaaactctcctctctcaacaaaaattctccccacagccttggtgtgcagcagttcatgcaaataaacccagaggatgatgccaagctggactcttctttccattttgagctcctgtcccccgcccatggctcaaagcccctctggctcatggcacatcagggcagggttcccacctgcacacctcaaaccttgggatgaaagggttcatagctctggtctcacggatcttccccacagcagagccaggcgagctttcctatggacacagcccaggcctgctccccaactcccataggctaagatggccctgcaggacaggtaggaccttggcaggcaggacaggatgggagtggggaggctgcagacgtctgtagarctccatgctgttcctggatgcctccccatgcattgtcccatctggttcctgctcccttgcaggactgggcagatgccattccccttttagagctgggaaaagagccctctgtgacttgtccgcgatcccacagtcagaaagcatctgagggagactgaacacagttcttctggatgcaaactcagttctcatttcccaacctgactcrgcctctgggtggaggcagcttctttagagaggacgcgcatctgatgtccttgcagagaaaccctctgcagaggctgctggattggcaagggcataggggaggggacagggtgggtgcagcccaagatcactggagttcctgggaagcggggagtctgtggttctctaatggctgatttttctggggaaaagrtggtgttgactgtcccagcttggatgagaggatttgcgcattgcatctgaaaccaagaaagactaggatcgtctttggaatgtttgggatggttgattccgctaaggactattcataaggcacatttaccagctctcccttaggtcttttcatgaacatgtttttattagttcgttctcacactgctataaagaaatacccgagactgggtaatttataaagaaaagaggttgaactggctcacagttctgcaggctgtacaggaagcatagtggcttctgcttctgaagaggcttcaggaagcttccaatcatggtggaaggccaagggcgagtgaggcacttcacgtggctggagcaggaggaaggtgcaggggaggtgccacacacttttaaacaagtagatctcacgagaactcactcactgtcacgagaacagcaccgaggggatgtgctcaaccatgagaaattgcccccatgatcctgaacaagcacacagaacaggctgcccctgctgctagaagggcttcttgtgggcccccttctaacccccaccagctcctgagttagaatccaggagggtgcatctgattggctggacctaggtcatgtgcttgagccctagcagccccggcagcaagggaggctggaaaaggcaggagtgaaggggctcagcttctgtactaggaggttccacgccctrcctcctacacgattcatacataaatagaggattccctgaacccaggaagggagttcagatgctgggcagccaggataattacaaatattctctacgttagggtgtgtgtgtatgtacagggcagggctgggatgagcagggtggttaagagaatgagatttggcatcacacagatgggtctgaggaccagcaatcttcacttattatctctcagtcctggcgatatacagcctgtcccagcctcagttttcttgtcagcaaaactgggatactaatgcctatttcacaaaatggtagccttattattcttatagtagatgttattattaggaatattgtgatagcaatcataacatggtgtacccatcatgttatgatacctcggtcatgaactgtaagcctatgtgtaaggcctggttagattgaccttctaattttttacatgtctctccagcacagatggtcaaatcagcttttgaggcctgagtcctgatacagtcctcaaaaggcaggtgctttttttttttttttttttttttgagatggagtttcactcttgtccaagttggagtgcagtggctcactgcaacctccgcctcctgggttcaagcaattctcctgcctcagcctcctgagtcgctgggattacaggctcctgccaccatgcctagctaatttttgttatttttagtagaaatggggttttgccatattggccaggctggtctcaaacccctgacttcaggtgatccgcctgccttggcctcccaaagtgctgggattacaggggtgagacactgcgcccagccaaagagcaggtgcttttaaaaggattaacctaagctctaagtataaagtttttattgctgttttatcctatagtgtaatgaccctctaacttttaattgtatatatatctataaaatatatagtcttatatagcaatgtctggttgggtgtgcccaaagtcctttatagctctaagcttcagaaaagtaaatagaagaagaagataattaaaagactaagataaaataaaacaattgtctttcccactggaatttggaggagatggagtttgcaagtaggagagttggaggggtagttcagcagctggttttatcggcaaataggccagttaggaggggtcgctgaggtttattacatgaaatcctcaatgggtgggcactgcagcacagagcaacctggagtgtgtggggtgggtaccccagtcaacacacacaggactcttgcaaacaggctccttgactgacatgcttctgtataactttcataaaaagatattgatgttcagagtaatyctggggctatgtagatccagaaaccgtcaaagaaagtttagattctactcagtagatttttaccatgaagcacatttcaccgtgttctcattcttggaaacttagggatggatgagtgatgttaattgcagtttgcaattctctgtcgaccacaatgttgaacacagcgggatactctgttctcatgcctacgtgaatagctacctaaatctgattgttaagtaggcccataaggtttacaggacagttttttttttttttttttttttttttgcacatagggaaaaagatgagtcatggtacatggttgatttctggattgtatcaaattgggaagaatttatgtaatcccaaactggtatatttgcaccaaaattcttgwtaatgacaggttgaggctgggtgtggtggctcatgcctgtaatcgcaaagttttatatatttttttgggagaccgaggcaggtggatcatttaagatcaagagttcgagaccaacctggccaacatggtgaaaccctgtctctactaaaaatacaaaaattagccaggcatggtggtgcgtgcctgtagtcccagctacttgggaggctgaggcacaagaattgcttgagcctgggaggcggaggttgcagtgagctgagattgtgccactgcactccagcctgggcaacagagtgagactctgtctcaaaaaaatcaaaaaggaaaaaaaaaagacaggatggtgtgatgagtagagatttacagaaagcagttttccctcagaaaggaggaggggagtagatggaggacagtcctctgggaatggtgagagctgggtagaggaagtgggttttgaacgataagtttgaagaattcattcatttggtcaacaaatgtctactgagcacctacaatacatcaggcagggttctaggcactggggatacaatagggaacagaacagataagyctcctgccctcatggtaggtgtgtggttttcaggttactctggaaaaaggatgaacattgggaaagatggaggagagagtgagtattgtgtagaggactgtaggtaggcttgcttcttttatacattcgttcaattaatccagcatttatgggccatcttccctgggcagattttatgcaagacactggggatacagagatgacgaagtcttatttgagaagttcaaagtctggagcatggaggcacagactttatggaacaggatgactgaggtctggtagaagcaggctcagaggaaaaatatgctaatcttgctagagaggatttgaaaagcttcctagaaggaaagaaaggatgctgaytgccagcctttagagacagctgagagcttgccaggtagcagagagagcrgaagaagattctaggcaaaaggaatgagaagacakctattgggggaagggagcactaaaagaaggctgtcaggcaggggaaggctgatggtggagagcctttatgggaattgtgattttaatttaatttgagacatgatgggggccacagccaggttgaggaggtaactccatgaaaattacatttgaggttgatgacttctgtgtgcttgttcaggatcatgtccttaaacagggaatactcattagcaaactaattaaggaccttaacaggagggacggtaatttgttgggttttagaagacttagtacaataaatatawtgattgagtttgggtttgccaaggaattaaagagtccgcacttccctaataaaaataaaatgaaaatacttttttggaaaactgacagtaaggcagtaatgactataataaaccagaagtccttcgtccacaaaccactgtggttgacaataagggattaaacattacctgaattggtagagaaattattaatagctgttgctttttaaaaatagacatttactgccagtctctggggaggagggagaagcagaaasgtgcaggtgctgatggctttgaagggcattagctgtgcctcttccattctcattttctcttccctcattcccttttccaaactgagaacctggattccatgtccaggtgggcagagggaggaggaggaagacgtgggagatggctggaaagaagaacaagccaaattcttatgtacttctgggcatgcttgtgctcctgttttaattttttataccttgcaatttagtgaacttggagctccaaaacgtctgttgaatcttgcctcggtgctctggttctcagccttggtggcagcagaaacccttaaacaaaaggttgaaaactgcacgttcccagcgctttcctccccgcccctttcctgggttttctgtttactgggatgtggagaggaagtgcaaactctgtagtttctaaagttccacagggggctttggatgctttacctggggttgaggtactgacttggaggctcacttgttgtattagtctgtttttatgctgctgataaagacatacctgagactgggtaatttataaagaaaaagaggtttaatggactcacagtttcacatggcagaaggcaaaaggcacgtcttacatggtggcagacaagagagaatgagaatgaagcagaaggggtttcctcttataaaaccatcagttctcatgagacttagtcactaccacgagaacagtatgagagaaactgcccccatgattcaattatctcccactaagtccctcccacaacatgtgggaattatgggagctgcaattcaagatgagatttgggtggggacacatatcacttgtgtccccaaaccatatcacttgtgttctctctctctttcatttttttatttttttgagacagagtctctctgttgcccaggctgcagtgcagtggcacgaacatggttcactgcagccttgacctctgggcttaagtgatcctcctgtctcagcctcctgagtggctgggaccacaggtgtgtgccaccacacaaggctaattttttaatttttattttgtaaagatggggtcttgccttgttggccaggctggtctcaaactcctgggcttgagtaatcctcctgtcttagcctcccaaagtgctggcatcataggtgtgagccaccacacccagcctcacttgtgttatctggacccctattttagatgtaagtagtcctgggaaggcagtgctgctctagactttccatggctgttttgccagacatgcagcagaactggtgtgcctgtctggggtagggagatggggcccagggtgggctctgaaagaaggctctggaaggagtttggagcatgacagcattgggtgccctcagggggcaaaacagcagaggacaaggtacagaaagatctaggtggtaggagaggcttccagaagagaggcagtagggacctgggtctcggctatgcaggcccacgcccttggacctcaggcacgcttatctccagcttctccccttccctgctgtgggtggggcatgcccacctgctgaggaaatacctggaaagaaaccatgggacaacaatctaacctggtacttttccactccatatggatctagaactcctggcacatactcctgtgtgatcttgtggaacactgggcttctctggaggagtcattaagtgctggctgcaccctgaaacggtggccctgtgactctgcagaggtcaccacagaagttctttcactctgggtcatcccccatctttagctcccctccccttggtcttgtgttgcttatcttcattaatttgtgatgaggagatatgtttttatcactgaggcctcagcctgccacctgcctccccgttttccttttgccttcagaaactagttatttttacaaaggagggaggagtgctcctccctccaattccrtttaaaacaaacatggttttggcacaacaagcctgcctcctcgaagtaatggccgctcccccgtgccagttgctattctgccctcatgagagtggagcgtgtgtttcctcccctagttcctctttgtttctctgcccttcctcctctgagggcacaggggcagacaggacatcctcccaccaggggctgcctagtgactggccgaagattctgatcatttcaggcctcccttcacattctccagcggcattttaaggtctttgctgtaaggcaaaagctggtttttcatccttcctccttatccaggtcttctgtttctggggtcagtctggtgcgtagacagttccacacatactctgtattagggatcctgaaagagagaaagctaaaagggacttcttccatttcaagaagagacttaaacaagatagaattccctttccttcttatgagactgagaataagcactctagcagcccttagtatcagggtcccaggctccctctgccatattgttttgccatctatagggtgttgctgccttttacgggactcacagtgggtcacaatcatttattgatccaggtagtaggatgccctttaagggcctgattcagaagttgtacatatcactgccactcacatcccattggttggctcttagtaacatagccctacctagaggtaggtgaggctgggaaatgtagtctttacrtgggtgtctgggaaaccaactaaaatctctattaattattagaagttttaaaaagataaatgtttcatgcatgtgtgagaaaacggcattctctaattgtcgaatgcagaattctatatatggtcgttagttcaagcttgtaatttgtgtggctgttttgtctgcctgacccatcaataatagagacctatcaataattgaaatctctctcgacggtagtggatttgtcaatttctccatgtatttctatccattttttgttttatatattttgaggttaattaggtgcattcatatttggcattgtcatgtatttagcattccccatrtatttctatcaattttttggttttttgtattttgaggtttgttcattagatgcattcatatttagctttgtcgtgtcttcttcgagaacgaacccttttctctgcatccagtgatcctctctagccctaaatatgctttttcttttaaagtatatttatcctatattgacatatgttgttatctttcttcattcttttaatttcaacatttgttcatgtttttatactttagatataccttttataaatagtatgtaggtggattttgttttttaaatccaatctgatgatttctgtcttttagttggcaaatttaggccatttatattgattttttttaatttatttatttttatttatttatttattttttgagatggagtcttgctctgtcgcccaggctggagtgcagtggctctcaatctcggctcactgcaacctctgcctcctgggttcaagcgattctcctgccttagcctcccgagtagctgggattacaggtgcccaataccattcctggctagttttttgtatttttagtagagacaatgttttgccatgttggccaggttggtctcaaaatcctgacctcaggtgaatccacccacctcagcttcccaaagtgctgggattacaggcatgagccaccacgcccagccttatttcacatatttcttgcggcttttcctggatttatttttcttatttgaatatcacttcttcaaaaagtgtttttaaatgtggattgtagcatgacagacttcctcaagccttgtatgcctgagaatattttcatcacaccttacatttgaatgacaatcttgccagaaatggaattttaggttcaatgtactttcctcagtactttatttatggattaatattttttagagacaaggtctcactctgtgtcccaggctggagtgcagtggcatgattacagcttacttcagccgcgacctcctgggctcaagcgaccctcccacccacttcagtctctcaagtagctgggacttgcggtgctaccattcccagctaatttttgtatttttggtagagatggggtttcgccatgttgcccaggctggtctctaactcctaagactaagctatccacctgccttagcctcccaaagtkctgggattacaggcatgcaccatggctcccagccattcagcactttacaactcacacttcattatgtttttgcattcactgttgtggttaaaaagtatgatattcacttttaaagtgacttttaaaaagtatgatattcacaaaggaaaaaggttatttttccttagtaggtgttatgctccttctgagagttttcaaaattttctttttgagtttggtatttctaaattaattaattaattatttccatgattctgcatggtattcctaaatttgattctagtgtgcctagatgtggaattttcttctctttccttttgatgttctatgcactcttttaatttgaatatattcatctttaatgcttggaaacgtatctccatgaattcttcatctattttcttctcttcatttctatttatttttttctattctgtgactccttttgtctggatgctggtagttttactttcattctccaagtctcttaacttttcttttatattttctacatttgaattttcccctgcttgcttcctggagtgttcctcaatctgattttctaattcactaattcattctttagctgtatccattcaaccacgaagcccatttattgtgctctttattcccattatataatttccataccttgtattttctccctgttcttgttttatattgctatgtttggatgaacaaagagagagaatgggcaagcctgggaaagaaccccagataggatgcccccatttggtatcacccaccaagcaacacctgaggccagagcttcctcttcagatcctcaggcagaagcagcaacaggaataggcatgcacagtttatcatccccaactctgggattgggagggcagggaatgcagaggctactcagccttcactgaagttctataaggtttcactggaatgggacttctgggctgccctgattttactcttgtgtcagcagtytgggccacaactgccaatttctaaaggccgaggaaagatagtgattgtcccaaggcaatgatggaagagaagagtggaactcaagttgctttttctactgtctcctcctagagcagcaccagctggctcatcccaggctgcaacccttaccactcttaccaccatacacatgcaacagtttctctttcagtattctcacagtttttccgttagttcctgaattttgtgttttgtacctcaattaggttgactctgggcaagacgtataatggtttatgtgaattttccatcttggcaaaaattggartctcagcagagcaacctttgtaagcctgttgtattagtcaggcttctccagagaaacagaacaaatagaatgtgtatatatttatagaaagagatttattatatgaaattggctcatgagattatggaagctgacaagtcaaaaatctgcagggtaggctggcagtctggaaacccaggagaagcaatgctttagttatagttctagttcaaaggcagtctgcaggagaaccaggaggtgccaacattgcagatgaagtccaaaggccatctgctggagaatcctctcttgctcaggtgaggccagtcttactgctttctattcagaccttcaactatttggaggatacccacccacataatggagggcaatctactcaaagtctatggatctaaatgttaatcttatccaaaaccaacctcacacccagaatggtgtttgaccaaatatctgggcgccccatggcccagtcatgtcaacaygtaaaattaactcttacacctgctattccaagtatggtttgaggaccagcattggcctcacctgggagcttgytagaaatgcagaatcttgggcccacttttgccaagatgcctgcattggaataagatgcgaatcttttcaatttattgagccagagcttcatatcagtaaaaataagaactttggattacataagagattctctgattaatgtccctgcatgatcagggatcttaaaaaaaaaacaattacataaaactgcctaggctyaccccagaccaattaaaaccgaatccctagaatagggctcaggcatctcttatmgtgttttgttttgtattttttttttaaatctatgctggtgaatctgttatccactgaaggtgagaatcttcagagttgtgcttctcaaactacaatatgcatgcacatcacttggagatcttgtgaaaaatgcagattctggctcatgagacctgggaaggctggagattgcatttccatcacttcctgtttcaggaccactgttggacttgggagatgctagactggatgacaggtgagatcctttgcagttctgaactgctctgatccctgaaaccaggagagcttyacaggtttgccaaggtgggttccacccagggacacacctcttagtatctaaccaggaaataaggcctccctctctgtggtttccagcatcttctgaactcctcaagtcaaagaaatcagatgccttcctgctgctgctacccacatggaaactaatacattgctcctattgaaagcttggctctgtgccctgtggccagagtataaggctctagaagatattaactgtgtcctctgtggggatgggcagattaagaatggtgatttggcatcagagtaacctcatgtggtgactgaaaaacgtaaactaattgcagaccaaatttaagatggtcgtacctgaagcctaagccgaggcctgagcggcaccctcaagagtcccctcttgtctcctcagctggaataactttttctcaactggtggctatcttggacgttagtttaaagctctgttgtaatgtatgtcaccctgactggagttctaggtattttgtttcttttctagattgagatctttggggcaaccactatgactctctgctttccttccagtcccttccaccacccatccccagctgcggccagggcagaccttagaaaacctaaggggttttactcccctgcttggagcgctccaaggaggcgcttgatgcttggagtaaaatctatactcgtccccatcctatctagtccctaatgaccctgcaatgtcatccttccccactgtcccttgtcaccctgctccagccacactggcctctccccatgcaacaagcccactcttgcctcagggccttcccagttactattctgcttttctttttttttttctttttgaggtggagtctcgctctgtcgcccaggctggagtgcagtggaggatctcaactcactggaacctccrcttccagggttcaggcgattcttctgcctcagcctcccgagtagctgggacaacaggcgtgtgccactatgcccagctaatttttgtacttttggtagagayggggtttcaccatgttagtcaggctggtctcaaactcctgayctcaggtgatccacctgcctcggcctcccaaaatgctgggattacaggtgtgagtctctgtgycaggcatcccagtcactattccttctgccaacacactcttccccagctcttcatgtagctggctgcttcttttcattcatctcacagcttcaatgtcactgcttccaaaggaagacctcccttctaagtggtctttctcatgccaaaatgactgtgtaccccataacttattttaatgtctccatagcatttatgactattagaattctcttacatattgatgttttctgatttattctctcttcccttgtcctcaccccctaccactacattgtaaactttacaagccactctatatctcttagtgtcaccttagtatctctagtgcctagagctttgacctgcagcagtaggaggtcctkgattattaattggattaatcttgaattttccactgcacttagctcagttcattcatttaacaaaggatgtttttcctctaaccaaaatatgggtagcaattttgggtgtcctctggaaaaacttattcatggagaaacttacaaaaacaagatacatttgacagaaatagcatgggactcaatcggactctagtttgcattggtaagggtaaatgtggggccctgggctgtgaaatgtttgccaatcagatttgaggaaycataaaaagttcagaatcagcttttgcttctgccccctgctctacattcctcttgggtgcccagtggtaaactggcaagaagcagcagctgagggcatgggcaggatgttctggtcctggatctctgccttgcccccacatcctaacaccactgggaagacagaagctctcagcacctggcccaggtttccactaaaccctggcaaagtaacgcagatgtgggatgccagggccaccacacagggaggcaaagagaccttcattggaggaggctgctgctgctaggggtgtagaggtgagccaggggccagcagcagattgtgccaggggcagctgggaatgggctgtgcctccaccgagcctcaagccatcctctgatctcgctagtcagacttgaccactcttccagatgtgcatgattcaacccaacacagctggcaaggtggaggggcaatatgatgtttcactcgtactaatgttgtagcttcacagcctcttggggtggtccataggcccctccaaggtggccttgggtgggtggaaggaggggcagaggttggcatccaaattgctccagactgagtctactttcaagatctattttgcactggagatgtaaatttccacttaaaaatgcaaagtgagcattaacacagaggcgtggctaaagttayttgctctgaaaaagatgcgcagatatttttgtgtctggtgggaaaggagagagtgtcaaaggatggacaaaggccacctctgtgtgaaggtggcttttgtgattttggcttaaccaaaaggtcctggagatggagtgacttggattctgattatgggggtgtctgctgtgtcccattcttctcattcagttgaatttaattcatcaaggaggaatcgtgtgcctgctctgtgccaggcactgtcaggtgccgggaatgcagcaatgaacaaaatgtagatcaattcctgccctcttgggccttactacctggcagaagatataaaaaagggccacttccacagcattgtgatgacagtgggatgtgaccatccctttcctagctagaactggggatttggagtccgaaggcccagttgacgtttctggcccttcaacttccagctgtttgactcgaggccaattatttatttatttatttgagacaaggtcttactctgttgcccaggctggagtgcagtggtgtgatcacagctcattgcagtcttgaattcccgggctcgagtgaccctcccacctcagcctcccatgtagctgggactacaactggacaccaccaggcctggctaattttttaatttgttataaagacaggaaggagtctcttatgttgcccaggctggtctcgaactcctgagctcatacaatcctctcacctcagcctcctgagtatctgggactataggtgtgaagaccacgcccagctgattttttaatttttatttttagtagcgatgaggtcttgctatgttgcccaggctggtctccaactcctgagctcaagagatcctcccacctcgggctcccaaagtcctgggattacaggtgtgagccactgcacctggcctatttactttttttaagctttagtttttttcagttctcatatgaggaaatgacatctgccatgtccactttgtgagtttttaaaaatgagaatacagtgagataatctacctgaaagctttttgtgagctcctaaggagacttttgaactgttattggtactatgatctctcactatcctctataatgtcatgatgctacttgttatcaaaagctgacaaaagctataaacgtgcactctttgtcatagtagccactagccacatgcagccgaaatggggctaactggaattgagatgtgctgtgagggtaaaatacacactaaactgtgaatttagtaaaaaaaaaaaaaaaaaaaaagtaaatctcttatattgaatatatttttgatcttttgggttaaattgaatatattayttaaagtaatttttttttttggagactaggtcttactctgtggcctaggctgaagtgcagtggcgtgatcctggctcactgcaacctcaacctcctgagctgaagwgatcctcccacctaagcctcctaggtagctgggaccacaggtgtgtgcaaccgaacccggctaagtttattttttgtgtgtatttttttggagagatggagtttcgccatgttgcccaggctggtcttgaatttctgggctcaagcgatcctcccacctcggcctcccagaatgttgggattacagcaggcctagcctaattttgttaatttttaaatgtggctaccagagaactttaaatgaactatgtggctcacattatgtattgactgaacaatgcatctgtagaggctgtctttggaagtttactatataaccaagacccacgaacactcatgcagttcccaggggtatcatggactgcttaaagtcccatctgtgaaaccctaacatgatgattttaaaggttacttttcatttacattcaaaatgtacataaagaatgtccctgtgagattagatcacttaagggagaaccatgtctgtgtttcactacgcagaaaatggtttcatcgtctttgtcctgaaagccactgcctggaagggctgtgcagcgctcagagtggragaggcagacctctgagacaaatgacttcagcatcactacagctgtggctagaatgagaacagcctcaaatttcactaatgaagagattttctgagttccatgtgagcaacgccgcttccttcccatccccgagtgattccccttgtcaaagaaaaaagacacaaccaaaagggagagctgccatcctttcaggtcccttcttgttcttcgtctcactgaattcacccctaaatgctttgaagtattctccatgactgtttcatcaactgaggaaaggaggcccagaatggcttagaaacttgctaactggtttagaagaagaactgagattcaaatgctttgcagtgtaggtctgcttctgccacaaaatggcagccaggggaggaaggagaaagtgaggaaagggggaaaattarcrctcgggctttgtcagatctcaggagaggcggacgctggctaagccccatcgccttatctttattttgtgagaagcaaactgtggggtttggttgcaagagaagatcttactagggaccagttgcagggtgtattaatcaggggtttccagagaaacagaactaataggatctatctgcctgtcatctctctctctctctcctatctatctatctatctatctatcatctatctatctatcatctatctatctatctatctatctatctatctatcatmtaatctatcatctatctatctattcatcatctatttatcaactatcatctctcatctatcaactatttgtttgccatctattatctatctatcatctatttatctattaatcatctatttattaactatcaatctatcatctgtcatccrtcaactatttatctgtctatccattctctatctatctgtctctctgtctgtcaatcagtcagtcaatccatcgccagaattggctcacatkattatggaggctgagaagtcccacaatctgatctaccatctgaaagctggagacccaggaaagctggtggtgtaattcagtcctgggaatggaggtggtgggaggatactggcgtcagttccagactctaaaggctcgagaaccaggagctccaaagttcaagggcaggaaaaaatgaatgtcccagttgaagatgagaaaacaaattcacccttcctctgccattgtgttctattcaggccctcaatggatgggatgaggcctacacacactgctgagggctctcttctttgctcagccgaccaattcaaacgctcatcttttccagaaacaccctcatagacacacccaggaataatcttttaccagctatctgggcatcccttagcccagtcaagttgacacattaaaattaaccatcctacagggatttcctaccgttttggggaagccatcttttcatggcttccttccagaggaaaattcctgctatatgcttgacagaaagaacaaaaccccaaacatacaaaaagaccagtctgtggaatgtagacaatttgggtcagatgtggttccctgcctagaggagccagtgagatgagccatttccatccaccaaagatgggcttgaaatgtggtctacctttcaacatggtgccactgagggcttctgagctggctgtgatcatctgacaaaacrctgtgttggccaactcatagaagagtttgctagctggcctggccccaagcagaagcagcaggtyactgcccaaattctccaagtgggatgaccagcggctatataaagggcaaacaaacaagaaagcctttctttctgagaatgtttccactgcagttaggttagaaaatgatccagggaagatataaactagccctttcatttagcaaaataaaatgcctatccgcttggtaatctgtgcagtggaagtcagagccagagtcttgtttttaaagattttgttyaattcaccacccccatacctcccctcccactgcctagcatcaggctggacaagaagaaaagggacactggcctgcagatgctgccacgtgacatgtccttatagaatagcttctgtgacatttgtattaagtaaccacaggaaaaaaggtgaggtgttgatgacagaaggcatctgtattttctggggttgggttccagttttaatgaatatggataatgcacaaaacatctcatttttcggagctgtgttttttcattaaacactgccactctgcatgggaaaggaactggacattcctgacacattatttggcaggtctcaatcgcaagtgctccaatattggctttcggaaacccattccagatttggcccagattgtcaaatcttgtccagagcaccaagtcaaaaggtgcctctaagccctgggcagagtgccaggctctgaaaaacactggctggatctcctcagggaccctggctgagacaggygagtgatttgttcttcaaatgacctttccctccttggaaaagagcacccggaataaaagtgcaagatgtgcttcagatgtcccccaagagtttaacacaagcagaggtattgaggggcttctgtgtattgaccaaagaagaaacatttttttggctgggcatggtggcttacgcctgtaatctcagcactttgggaggctgaggcgggtggatcacctgaggtcaggagttcgagaccagcctggccaacatggtgaaactcccatctctacccacaaatacaaaaattcgccaggcatcacctgtaatcccagctactcgggaggctgaggcaggagaattgcttgaacccgggaggcggaggttgcagtgagtgtggtggtgggcacctgtaatctcagctactcaggaggctaaggcaggggaatcaattgatccgatcttggctgcagtgagccaagatcgaaccactgcaccccagcctcggcaacagagcaagactccatctcaaaaacaaaaacaaatgaacaaacgaacaaaaagaaacattttttccctgtggtaggatgtctgccctcaagcagtgaacccaactactgtagaactggtggcacctgtccaattaaaaatgacatttgctttaaggtaaaaatatattatatattagggttggggctctgtcttctcctgagtagtgtgtcatccagcatttttcaaagcatggtctggagaccctcctacatcagaatcaggggacgtgtttcaattacaaatttctgaccaaaccacctaccaaatacgtgggaactagagctaagaattttcactgtaccaagctccaggaaatcctgatataccccaaagtttgtgagccattggatgtaaaaaaccacatacatatatataaaattgttgttgtttgtttgtttttgagatggagtcttgctctgtctcccaggctggagtgcaatggcgctatcttggctcactgcaacctctgcctcctgggttcaagccattctcttgtctcagcctcctgagtagctgggattacaggcatgagccaccacacccagctaatttttgtatttttggtagagatgggatttcaccatgttggccaggctggtcttgaactcctgacctcaagtgatctgcccacctcagcctcccaaagggctgggattacaggtgtgagccaccacacctggcccccttcatatattttaaagccattaaagcaagctgtgatggacaataagattggtttcttttgctcacatccatgtgaacttatttaattgtgtgtctgtggtagtgaaactttgaaccacaaaagacagggactactttaagccttcgcttttgcagattgatacgtgtatctcgtccttttgcagttacttgtcattatctgccyaagaatagtatttctaagaagttgtttctgtgtatcttctggggaagaatttgtccttcagttacatgtgattgcaacatgttgataaaagcaaaagaaaagcaataaaatcatttggttgaatatctcatttctttgaagccaaacagtttttgagtgataagaaagcaattcagtggaacttactgttcagcatcttacagaacaggattcatatgtacttgtgtattcayatgcgaattcatgcacacattatcacctaagagagtctgagtgtcctggtcctcaragtatgtggttttcagaatttacactgtatacaaatctagaacgacatttgctgcctaaaggacaatgacgttagatctacacagcaagagttgaatagagctttgttcatcttctcacaaatttgggtggatctaaattgcttattttaggacaatttaaacttcctagtttaaaactttatggttatctggttaacttaggtgaagtctattacattagacagcaatgaaagcaaatgagccacccgccaagtaacaaatggacctttaaccaaatattcctaaatattccaaatattcctaaatcactacaaaacgcttctctaaaatccccaaaactgttccatccagggacaatataaagtcaacaggaccctatgaagatgccagtgctaaaccaaagtcagaacatgtttcttcttatgaacaatggaatcttttatccataacggggtctctttttagtttgcctggtaaatctagaaataccagggtgacccccactgagacatcatagtacccaaaggaaaatgttgcttccttcattctgtgaccatagasagtttaaaagtgtgtagccaaaacttttgttagttttagaggagatgcatctaatgattttgctgtggttgttaggccagaagttcatttagagttcatctatgcctctagatcattctcccaggtcctcttacaacttcctggctcaatcatagtggtaaggtccaccttgttcaactcccatgttcctaagcaacattaactactatgacgtgaaatcaggaagacaattgcaaagtgctttcaaaatgtgtgtgtgtgtgtgtgtttgtgtgtgtgtgtaggagaatgaaaaaaaatcaggtcttaagacattgcagaggccaggcacggtggctcacacctgtaatcccagcactttgggaggccgagatgggcagatcacctgaggtcaggagttcaagaccagcctggccaacatggtgaaaccccatctctagaaaaatacaaaaattagccaggcgtgatgatgggtacctgtaatcccaacctgcttgggaagctgaggtgggagaatcgcttgaacccgggcggtggaggttgcagtgagccaagattgtgacattgcactccagcctgggagacagagcaagactccgtctcaaaaaaaaaaaaaaaaaaaaaaaaaaagacagcagagtttaacaaggaaattgaaatctactctaagtattttaaaagagggtattagaaaacactctgctatgtctcaggtgaaacagagagtatttaatttaatttaatgtatttacttagagatagggtcttgttctgtcctccaggttggaatgcagtggcataatcacagctcactgcagccttaaagtcttgggttcaggtgctcctcctgcctcagcatcctgagtagctgggattacaggcaggcaccaccacacatggctaatttttattttattttttaaggaggatatcgctatgttgcccagcctggtcttgaactcctgggctcaagtgatccttccatctcggcctcccaaagtgttgaggttgcaggcatgaaccaccgctttggccaacagacggtatttatgtaactgcccaaggggttctccttgccagctgcctagacagagcctatttatcaagacaggggaattgcaatagagaaagagtgattcacgcagagtcagctatgcgggagaccagagttttattattactcaaatcagtctctccaagcattcgtggagcagagcttttaaggacatcttggtgagtgggggcgtgggaggctagtgaaccaggagtgctgattggtcacagatgaaatcatagggagtcaaagctatctttttgcactgagtcagtaacctgggcaggggccacaggatcagatgagccagyttatcagtctggatggtgccggctgatccatcaagtgcagagtctgcaaaatatctgaagcactgattttaggagyggtttagggagggtcagaatcttgtaacctccagctgcatgactcctaaataattttttctaatcttgtggctaatgttagtcctacaaaggcagtctagtccccaggcaaggaggaggtctgctttgagaaagggctgttatcatctttgttttaaactataaactataaactgagtttctcccaaagttcattcagcctacacccaggaatgaacaaggacagcttgaaggttagaagcaagatggagttgattgagttagatctctttcactgtctcagtcataattttgcaaaggcggtttcatttgctacaaagaattggttcagtgggtgataaaagttctgagaggccaaacaaagggcagtggaggaacccagaagttggtaacagcaggaagccactatgtttctaggcttgcgagtcaaaaggaggggaggttgccagagccaggagctgggttactcagcacccacggtgggcatgtctgggaagaactggagtcacatgggatctgcaggagtggctgagatacctggtgaggtagagagagaaggggagagatcctctggcttctcctttcttcccactcttaatctcctgacaatgccccgcttagccaaactcacctggaagccaggaaaacaccatctgcatgggtcagccccactgaccagcacaggggaagaagcactggatctgactggctcagtggtccrtaaggaatayggcaggaccgactcctggctgacaaaggtgggagtcattgaactagtggaattctggccatcacctcacgcacctacttcatggcatgctttcatctgaaccattttattgcttgagggtgataatccatgacctttaaaacacagatatatcactgggtgtggtggcgtacacctgtggccccagatacttgggaggctgaggtgggaggatcccttgagcccaggagttggaggctgctgtgaactgtgattatgccactgtactccaggctgggtgacagagggagactttgtctcaaaaaataaataaataaataattaaaaaattgaaaaaataaaaattgaaagttaagaaaaccacagataagtcacgggcagacctttatcagaaaccaccgtgcttgactacctggggcagtgctgtggttctgctgggggttagaaatgcaactggaaggcctttgacggccactaagagggccacacctttcgttaattctcctctaggatgttcttgggaaactgagttgaagactcttcatgaactcatattggttcttctcaaggaagagcctctgcctatggagagttgtactaacttatactctttagaggatataatgacctaatataggcaagaaaatatagtacttattattagaataacaatccayctataaaatgcatctgttatggaaacacagctcatggtgagaaccgtaaatagctttgttttccattttctatactgcctccccaaccaatacagacagtaatcaatctggaatgtcacttacttaatggtatgatctggcctttaaaaaaaaataaaaatataaaaatataaaataaaaaataaaaatttaatttcaaagcaattttcgatttacagaagaattgcaagcatagtagagagagttcccataggcctcacatccactgtttcctgttattaacatcttatgtaagtagagtccatttgtcacaattaatgagccaggtacattatyattaactaaattccacacttgattcgtattttcttcaggttttcctaatgtcgtttatgtactgttttctgttttaggatcccactggggacaccacattacctttaatcatgcctctttaggctccttttggttgtgacagtttctcagactttcttggtctttggtgaccttgacagttccaaggaacactgtcacctatttgttagaatgcagagatgagatttgtttgatgtttttctgttgattagactggggttatggagttatgggaagaccagagaggtgaagtgtcattttcagtaaatcatgtcaaggaatggggattagaaatgcaactggaaggcctttgacagccactaagaaggccacaccacataacacctacacgattcatcactgttgatgttgaccttgatgacctggctgaggtagtgcccgtcagacttatctagtgcaaagctcctcttcctccatcccttccatgctgtactctttggaaggaagcctttttttttgagacagagtctcgttctgtcgcccaggctggagtgcagtggtatgatctcggctcactgcaacctctgcctcctgggttcaagcaattctgctgcctcagcctcctgagtagctgggattacacgtacctgttaccatgcccagttaatttttgtatttttagtagagacagggtttcaccatgttgtccaggctggtctcaaactcctgacctcaggtgatctgcctgcctcggcctcccaaagtgctcagattataggcattagccaccacacctggctggaaggaagtcattttgagtgatgctctacttttttgaggagcaaatatctacatgatttatttggaattcctctgcactagagattggtctattcttcccgatttattatttaaatatttggtcatttatttatattagtattggactcatgaatacttattttctatttggggttatcattcaatagtactttatttatttgtttttgctcaaatggttcctgctttggtcagtaggagttctttcagttggctcctttgttcatttgacacactccccatcattgtggttttttggtatgcttagttgtttagcatgtcattactttggcactacaaaatgccccagtcttagaatcagccatttctccagggagccctggataagccattgctaaagaatcattttagaaaccaagatctaggtgctaaatgtgtccaacctggcccccccccgcttttttttttttgagacaagatttcgctctgttgcccaagctggagtgtggtggtgctatctcgcctcaccacaacctccrcctcctgggctcaagccattcttccacttcagcctcctgagtagctgggaccacaagtgtgtaccactacacctggmtaatttttgtattttttttgtagagacagggtttctccatgttgcccaggctggtcttgaactcctgagcttaagccatcctcccatctcagcttcctgaagttctggtattacaggtgtgagccaccatgcgtggmggcagcctggccacttttaatctatccattcatttactaaatatacacattttctgagtcccgattttgggcaagactctggggcaggcaagaaaaatgaggtgcaactaactctattactccatggtccaagaagagggctgcctgcaagctatgaatagagcttacagagtrtttaaaggtggaaagagactttgctcctgattctagactttatctcctatsctcaaggtccatgtcttggtagctctgctcagatctacccttccagagtctgtaatataaggctgacccgagtttgaatcctagctctgccacttagtagccatgtgatggaacaagtgtcttaactgcactgaacctcagtttcctcatccttaaatggggggcagtgatgctaaaaggaagcccctccagaagccctggtgaagatgaaagggaggacttgtggaatgtccagcccagtgtctgcagagccaggcacagcaaatgctggtgagcaacaaggtgacaacagtcagtgttcctcttgggatataattaactttggagtaccagctgattcctaggacagagttggagaagaggatataattaacacgggtggtaaaggcagagtcaaggaagtagctgtggagtgagctgatgcctggggtcaaagacaggtctgtcctgcggatgacatttctcttgagaagtaaaccgtcagcaatcaggacctaggggtcacctagcatttggtggctcaacacaagctctagtaccaggaggtatggcatctgctacaaaaacaaaatgcagtcgtcacaatttgtgctcatcaaaatgcattarcatagtttctgccatcaaaacctgcttgacattaagaaggggtcctcttgctagggtacccaaccacagagctgctccctcagagggtgaaaatatgcttaacacagggctttctgttctggaaagaaaacaggacttaaactgagctgcttcagagagggttgagagcttctttatggagcaggcaaagcatggatgtcatgaactttcctaacacactaggtgaggggcagccctacagccctgagatagaatggcttttccattggtttttccratacccgagggagggcatgactatccccattggtgtttttccttcayttgagaagcatctaggccagtgattctcaaagtgtggtccctggaccagcagcagcagtgtcacctgggaacttgttagaaacacaacttcttgggttccatcccagatctacttaattaggaactctggggctgggcatcactcctctttcctgcccactgcaatctatgttttaataaacactccaggtgagtgactaggatgccagctaaagtttaagaactgtattagtccgttttcacactgctgataaagacctacctgagactgggtaatttataaagaaaaagagatttaatggactcacagttccacttggctggggaggcctcataatcatggtggaaggcaaaaggcatgtcttacatggcagcaggcaagaggaaaatgggagccaagcgaaaggggaaaccccttataaaatcatcagatctcgtgcgacttactcactatcacgagaacggtattggggaaccgcccctgtgattcaattatctcccactgggtccctcccataacatgtgggaattaggggtgctgcaattcaagatgagctttgggtggggacacagccaaaccatatcaagaacaattgatccaaaggctgcaggattgtccacaactttccaytggaatcctaaagacatttgaaactctaaggactttgaggtagagattgactttctcttgcatatgccattaagtaggtttgcagtaaatagttgttgaatggaggccgaggtgagcagatcacttgaggtcaggagttcgagaccagcctggccaacaagatgaaaccccatctctactagaaatacaaaaattagccaggtttggtggtgcacatctgtaatcccagctactagggaggctgaggcaagagaattgcttggaccggggaggcagaggttgcagtgagccgagattgcaccactatactccagcctgagtgacagagtaagactctgtctccaaaaaaaaaaaaaagtatccaaaaccctgacaacaccaaatgcttatgatgatgtggagtaactggaactatcattgactgctggcaggaatgcaacatggcagtgtcactttggaagacagtttggcagtttcttacaaaactaaacatattcttgccatgtggtccagcaatgacactcattggtacttacccaaaggagttgaaaatttgtgttcatgtttatagtagctttatttttcattgccaaaatttagaagcaaccaagatgtccttcaataggcgaatgaataaacaaactgtgctatatccagatggtggaatattattcagcaataaaaaagagctattgagccatgaaaagacgcagaggaactgtcatgcacattgttaagtgaaagaagcccatctgaaaaggctacatactatatgactccaaatataagacattctggaaaaggcaaaatgatggagacagtaaaaagatcagtggtcaccagtggttcagaaggagggagggatgaataagtgtgtattagtctcttctcacactgctataaaggaatacctgagactgggtaatttataaagaaaagaggtttaattgggtcatggctcagcaggctgtacaggaagcataacacaagcatctgcttctggggagacctcaggaagcttccagtcatgggggaagatgaagggggagcaggtgtctcacatggcaggagcaggagcaagagagagagaagggggaggtgctacacactttttttttcttgagatggagtcttgctctgtcacccaggctggagtgtagtggcacgatctcagctcactgcgacctccgcctcccaggttcaaccaattctcctgcctcagcctcccgagtagctaggactacaggcatgtgccaccacgcccggctaattttttgtatctttagtagagatggggtttcaccgtgttagccaggatggtctcgatctsctgacctcgtgatccgcctgcctcggcctcccatagtcctgggattacaggtgtgagccaccgcgcccagcccaccacacacttttaaataaccagttcttgtgagaactcattcattacttcaaggacagtaccaagagaacactgctaaaccattcatgagaaatccaaccccatgatccaatcaccccccaccagtccccatctctaacactggggattacatttcaacgtgagatttgggtggagacacaaatccaaactataaaaaggaggaacacagaggatttttagaggtagtgaaactattctgcaggatactgtgatggtggatacatgttattagacattctcaaaccccaccgcatgtacaacacaaagagggaaccctaatgtaggctatggactttagttaataataatgtatcratattgtgtcatcaatggaaacagatgtaccacataagtgcaaagtattaataataggggaaaatggtgagggcatgtggggatacacaggctctctctgtacttgctgatcaatttttctgcgaacccaaaattactctaaaaatgtcttttgaaaaaatggaattagggaaggtcagaatgccctttgatgaacaatcactgtttgggcatttgaattaatatcctgacggacagcaactagagccctttcccaggtatactgtcagatctggttgtccttgactttcccatgatctcttcttgctattaagccttactaccaacacactggggtcagctccctggacacatgagcatgctgattgaagagcatcttgttttattagaagcataagttctatcatctgttctccatagtaaagaggggtctttctagcttccaagtatagcaatgaattctggatagaattgtatctggccctctttgtgaaattccagatacttgggggaatgtcctgggacactggaagaaattttttttttttttttttgatgagatggagtctcgctctgtctcctaggctggagtgcactggcgtaatctcggctcactggagcctctgcctcctgggttcaagtgattcttctacctcagcctcccgagtagctgggattacaggcatgtgctaccacacccagctaatttttgtatttttagtagagatggggtttcaccatgttggccaggctggtctcgaactcctgacctcagatgatccgcccaccttggcctcccaaagtgctgggattacagggatgagccacgtgcctggccttctttttttctttttgagacagtttcactcttgtcacccaggatggagtgcagtggcgtgatctcagctcagtgcaacctccgactcccaggttcaagtgattctcctgcctcagcctcccacgtagctgggactacaggcatgcgccaccacatccagctaatttttgtatttttaatagagacggggtttcaccctgttggccaggctggtcttgaactcctgacctcaagtgatccayccrcctcggtgtcccaaagtgctgggattacaggcgtgagccactgcacgaggcctgataaatttcaatgatttgactgttctggtggatgaaggccttggatatttctccttgtagggggaatcagttgttctgaagaactttggtgtttgccttaagatgatgagtagaagcttctctgtgacaactgcatttcacactcatgaaaacattccagtaatattaaccacgtggctcttgtaatcttaaaaagtcccatattgcttcagcaattttgtcaagggggttgctaggaaaaaaagggaggggtggcagaatgtcaattttctttagggtggcaataagctcagctaagattgtacatttctcagattccttgtagtcaggggagacctttggcaattctggctaatgagaagtaagcagatgttacagggtggggcttccaggaaagctctttaaaagaagacagaaaaaaaaaaaaatgttggtgtcaggggaataaattggcacgcayctttcatcatctgttgtcccatttcttctccctggaatgctgatgcaatgctggaggcagagtcgccattttgtagtcatgcggtgactgtgagcacgaaggcacaaactaagcagggaaacaaatagctagaagaaacatcagttatagacactgttgtgcagctgccataccaatcctgaatggcttaccacagcagccctttacatgagaaaagcaaagcccctaatttgtgtaagttaatattttgggagtttctgttacttgcagtcaaacccaacatctaactgaatcagaggtattttcagtctacactagtggttgagagtatggactttgaggtctggcagacctactgatatgttgagctatgtgaccttggacatactgcctcacatttctcagatgcttcatttgtaagatggaatcaacaacagtactaaccactgggttgttttaaggataagttgatatattttaagagctaattagctcagtgcctgacacataccaacaactgactagatgtagatggtagagcgaaactgaagttgccttccaatacagatagagggtgcgcagttatgtacaagaagttttaaaactagggcacaggctgggtgtggtggctcatgcctggwaatcccagcactttgggaggccgaggcaggaggatcacttgaggtcaggagtttgagaccagcctggccaacatggtgaaaccttatctctactaaaaatacaaaaattagctggatgtggtggtgggaacctctaagcccagctactcaggaggctaaggcaggagaatctcttgagcccagaaggcagaggttacagtaagccgagattgtaccactgcactccagccttggtgacagagtgaggtcttgtctcaaaaagcaaaaacaaaaccaaaactagggcatgatttggcagcactgtgtcttggacactgaatattatacagctgctggacttcattgtcatgtgaaaaatcaaggtcatctgatgctaagtggatctggccaggcctaccctcagactggtattccctctctctgccccttctaggggtctatggctacagatcattgtaggaaaactatctgactcaacatatagccctccttactggctaaggagaattaggcagttatgcagagaggacaggctgtaatgcatgttccatggccatcccttgactcggttgcacccaaaatggacatccaacacaaagagcccattttgaaggctggccagaggctgaccaagggtcctagtaggaaaatttcttacctctgagwtggctgtttcaaatgttctcatctctccttagaactccttccctttctcattcccatctgatgatattgcttctcattgattgtagtgagaaaatagaagcaattggaggagaactgatttattctctcagaactgaatctctgccccttggccctgccttccttcctgttcccagggatgaactggacctgctccttgcagaggagagcacttcaccagggcactgggaccgtgtcctcttgccactctggaaaaccacttctctctctcctgtatcatgacatacaactgtacctttcttctggatcattctctatgcaaatgagctctaacctctccatcttaacaacacaacaaccttctcccttgagsctgagcccctccctgctcccttctcactgctgtgcttccctttacagccacacacctggcctgtcctcactgttctgaaagtgcactcatcaaggtcaccagtgactcttttgttgccaaatgcaatggccagttctgagtccttggtttacccaaacttcagcagcatttcacccaaatgattactccctttttgaaaaactgtctccacttgctgtcttcagtgtgagaaatagacaataaccaatattaatacctttataacataatgtgaactccattatggtgagggctttatttcatttacagctatattcctagcatccagaatggtgcctgttacatataaggcatgcagtatatttgttgaatggatgaatctggatcagaggtgagcaaagtgcagatcacagaccaaatctggcccattgcctgttttgtatataaagttttattggaacacagctatcctcatgcatttgtggattgtacaaggctgctttcacacatcggcagagttgaatagctgtgacagtgactgtgtgacctgcaagggcaaacatatctactatctggccttttacagcaaaactttgctgacccctgatttagataactacttcaacttccactacatgctgtgtgggcaagaccctgaccccacatgaccaatgagagaaagttcacatggaagaaacacagctgcctctttcaccaggagcattctcaggatttgtccatggccaagggctgagaaggactctctatgtaaatataataaaagggtatggggtgaagatggaagcaaaaaaacaattaatccgtattaataagaaaaacattcctgtgcaaccattttatatcatgcactttgcatatatgtttcactgaatgctcctataatccagtgaggcaggcactgtcatttccattttgcagatgaggaaatgaaagcaaatgcaagttaaatgttttgctgaaggtcacagagctacagaatatcagaaaaggggtagctgatgccagtaccaggaatagacccttggggcagggagcagctgtgataaccacaagcacacacagggttgtgatgacatgcaagtgctgttcccagtctgcccatctgtcttgggaaatcaaggcctaggaagatggactgacttgcccaaggccacctggccrtggtaaacggcacagcaggacttgatctcacagtctggctttagactcagttcctcactactctcctgtaatgcatgacaggtccttgatgaatagccgttaagcaaataaacgaatttgaaggcaaatttgtggaatcccagccagtgcctctgcctccaccctgcagaggccacccttctaaggttcagagggctcrgcagcatctgcttagagtagagctggcaagaagggggaggtgttgtcgtagaaattactagaacatttcaggatttattcattctctgtctacatttttgtctctcttggggcagtgcccatttccctggggaaactatcatttcaataactggtgataacatctgtctttaaacttgtgaaccacttgtagagatgtatttcagaagggaactaaggcttccggttttagggcagtttcttccaaaatcattgaagttgctttcttactcaatcctggctacaggtttgaattgtgcaacaaaatgtatcccccaacagactactgtacaaattatgccctccattgggaggtgaatttttttcccctgtcaaagttacttaacttaaaaaaattgggatttgatgtatttctctttcaaaatcagataaagccatcaattttatgtacatttggccagctctcaagagtgggacaggggtattctagagaggaagcattctctgctcagtaaggcatgttttcgattttctggttgtggggtaaaattaatgatatctttccttctgtattaatcaactcagattgccgtaagaagatactatagattgtgtggctaaaccaacagacatgcatttttcacagttctggaggcaggaaggtgaaggtgccagctgattggcttccaagtaaggcctctcttcctgacttgcagatggccgccttctcgctgtgtcctcacatggcctttccttagtttgtgcatatagcagggctggggtgggagttgggagtgagggagagagagaggaatttctcttcctcctcttataaggcaaccaattctattgggttagggccccacccttctgacctcatttaaccttaattatctcctaaatgccctatctccagatacaatctcactgtggggaytgaggcttcaacatataaattttgaggacaacacaattcaatccctctcctgggaccctgagaaccatcccatgtgacctgatactgtgaaagtttgcaagctgactgcaaatattgttcaatctggttttgagaccatgattaacatgcttccatgtaggaagatcccaaactctattctttagtttcaagtccttgcacacatgaggaaaaaattgtgtgcattgtgcagcagttagtagtttttctgaatattccatacagtaataatagctttgcttaaaaggtaccagacaccctactacaccttttgtatctctaagcattttgtattatcttttaatccttttcacaaccttgtgacagatgaaacagttattattattcccagtttatggatgaagaaactcaggtttagataagctaggtaacttgctcaagagaacacaactaggaaatgactcaattcaggtttgaacccagcactgtgtaattccaaggtattctcctaaccacactccgtgtctcccagttgttgatgaaacgtatacttccaaatacttcattccacaatcatcaggaatgatggttcagcttaatgctttaaaattaacctctggctgagaagaagttaattcagtttggtttagttcttgcttttattcagatttatcttatccatgtattttggttagtaaccattgaggcaaagggatattgctctgaaaagccactcctaacttaaaacattttgcttttattagaatgtcaaaaaggtttttggtaaaagacacttctaaaaaaaatcagtggagaatggtaatggtgccatttcccattctgtaatttattttaatgactgtcttctctcatctgtgtcgagagtgtcctaaggcaattttatgggtttttttaattaaaaattttgctcacttttcagaaaccaaaagagaaaactatcacagaaaatgtttttctcttctgtttgttctgtgtttcaagtamtatgtttctatcatgattaaagtcattttttttttgtcaaagaagtccagctgtttgaaccatctgaaccrgaagagtggaaaggaattgaggtgtttctccctccttctagaaagttaagggtagcagaatttgaacaccacaagcctcagagagaagtgacagaggtgaggacagatgacctaattggttattcctagttattagaattaggcggcttatctcttttttcctaaatgtttatacctatgggagaattttccagcttcctgggaacacaattttttttctttctcgagagagataagtgtgtttactctctgcagtatctattcaactgcaaggaagtattgcagggcagaagcaagctcttcaatacaaagcagctcatttcaaagcatccaggcttacttttgttgtctgtgcctattcatcctataaactgctcttcatcaaaatagttaactctcccctgttctgcccccatccactcttgagaatgaggggatggcaggaaaccatcaatacaaaaatctatgtggcaacaacaaccatttggcctgttgagaggtgcttatgcagaaagaaacacaagaaaacaaagaggaagtgtgtgaacttctgaccctctttgccacatgccatttggtgggtgggtggcatgagcaagcatcctgcagtgggtgtttttatggsaccaagtgacaaagagccaaasagggtgagaactcatgagtagcaagtggaaaactaccaagagctgtcccatcactcctgcaacaaacttcacctcgctcaagggagggtagctgaggctcccttctccaaatcctgcaagacacaggcactctgatggggccagctcttcactgcatgggagggcttttgttgaacagtgagtttctgtgccccgctccctttttggccccttttgcccaagtggagtgacactttatcaaytgggggggcaggcaacgaatagaggatattaatgattgctaacggacycccatctgctgttccgcctgcagcttttatgaaacccacattttaaaattaacacatggaaaagacagtcttagctcaaaagtgtcagctaggaaaggaattcaattgatccccactctgtagttgtctgagtggatctgctaaatgtggacttgcaggagggcaagaattgttctgaaaactgatatgagaacacaggccagcctgtgcagtggctacatcaaggaattccagaaggttttacctttggatttaaatgttggctttagcatttggtggaagttttctggggagatgagaatatgataactcagggaggaacagtaaaaattggctgaggacggctaatgccctggggttagtggtttgcgttttcttagaacatgcaggaaggcagggggcttttctagaaagcactctgggtctgaagatgtgagagctgtgattgagctgggtttagcctttattgtgacactctgggcaagaaacttaacttttctgagtgtctgttaaaaggtgacaataagacccacatctctcaaacgagacagtgggtgagaaagtgatttgtaacacaggacattacaataaatactacataaattttttgtataataaaacttgtaaataatgtaggctgtcaatgcatccgtttgttcaaggaacatrtatctacaaggagctgttgatatacaataaataacagactcagtctctgtcctcacaaagtttacagttgacactcacacgcaaacacaaaagtcctttaaagtgcggtaagtgctatgatgggtaaataaaggcttcatagaagtttataaagatgacgcctaccctggtcttgggaaatttccaggaggcttccaggagggagtaatgttcaagccaggcttaaatgccatctcctcggtgaggactctcatgtactgcttagttaaaaacttaaccccttaccctcctgttttatttttctttaaagcactakcgctatctgatgcactccctgtattcacttgctgatagtttgtgtctgtctctcttaaccaaagtggaagctcatgaagtgagatatttttctgttttgttttctaccgcatcctctgcgcctaggataggttatgacacatagcaggcactcaagatatgtttgtggaataaatgaatataaaatgtaagtgtgatttgggcagccaggagagctggaaataatattccaggagcagaaaaccataagcaaagaccaggaggccaagtgtaggtggcttggtttggctggagtattaacatgtgagggtggaatatggagagatcagactggggaagtaggtaaggccagatggtgaagggtcttgtaagccaagttcaagggcttggacyttattctgagggttgtaaggacagttgaagtatttaatatggaagtgataagatctgagtttccacacagcttgggacagggagaccatggggaagcttctttcctagtcgaggagcaagacaatgatgacctgaactaggactatggcaatggggagagggattagaagggattggaagggacaggccctgacagttgattggcagtggggaatgaaggtgagggaagctcagtgatcgggtggaggcaattcaagtgacctcatgggtggtggtccattcatggacatggggaagacagcagcagaagcaagtttgggatgaagatgatgagttttcagtgtggaacttttagctgagtatgttttgtgagygtttctgtgtgagtcagtctagaaatggcaactgaagccatagatgtttggaattttccagctaagagagaaaaggagtaggcttaggaaaagccccagaagacactaatggcagaaggatggacagaaggagagaagcccaagaaggaatgtgggaaaaagatttcgagggggtctaaggaggaccaggaatagatggtatcgcaaggagagaagggcttgccaggtcaagttagatataaaagtgttatgggtttaaaatgtgtcccccaaaacgaaatgtggaagttctaatctctggtacctgtgacctcatttagaggtcatgaatttgcagatataatcaagtaaagatgaggtcatgctagattagggtgggccctaatcttataaaaagagggaaatttggacacggagacacaagcaaggcaatgtgaagacagaggcagagtttggcatgatgccaccataacccgaggaaagccaaggaaggagggcaaccaccaggactaggaagaggcagggaagtctccctcccgagagccttcagagggagcgtggccttgtcaacaccatgattttagacttctggcccccaaactgtgagacaatatgtttctgctgtttcaagctacctggtttgtggtaatctgttatagcagtcctacaaaactaatacaggaagggaaagtatccacagatgtagcaacaaggaagtcataagaaaccgtggtaaaactagcttcagtctagcagtgagggagactcagactggagagggtggtaaagctaatgacagggggagaaatggagaccaggtctaagcaagtctccccaagcctggctacgcagggagagagagaagtctacagtagctagaagatgtcaatgaaatctatcgaacgatctaccaaatgatctatctatctatcatctatctatctatctatctatctatctatctatctatctatctatcatctatctatcttgagattttttttttttttttgagacagagtctcactctgtttcccaggctggagtgcagtggtgtgatgtcagctcactgcaaccttctccacctcccgggttcaagcaattctcatgcctcagcctcgtgagtagctgggaattacaggcacacaccaccttgcccagctaattttttgtattttagtagagacggggtttcaccatgttgcccaggctggtctcaaactcctgagctcaggcaatctgcccacctcggcctcctaaagtgctaggattacaggtatgagccaccatgcccagccctctcctctatcgatatctatctatctatctatctatctatctatctatctatctatctatcttctatcyatctatctatctatctatctatctatttatatctatctatctatctatcttctatttatawctatctatctatcttctatttatatctatctatctatctatctatctaatctatctatctacctacctatgtatctataatctatctatctatccatccctctaactacctacctattttaagtaactaattaacatatccatcaccttacatagttactatttgtgtctgtttttaagtggtgagaacacttaatgatcaactctcttagcaaatttagcatattcaatacagtattactcactatagtcactatgctgcacattagctccccagaatgcactgctcctctataactggaactttgtaccctttgaccaatatttctccatttctcccactgccccctcagcccctgacaaccagcatgctactctctgcttttatcagttgcacttttcttttggttgtttttgagacggagtctccctctgtcacccaggctggagtgcagtgacgcgatgtcggctcactgctacctccgcctcccggtttcaagcgactctcctgtctcagcctcccgagtagctgggagtacaggtgcatgccaccacgcccagctaatttttgtatctttagtagagaccgggtttcaccatgttggtcaggctggtctcgaattcctggcatcaggtgatcctcggcctcccaaagtgctgggattacaggcgtgggcatgccggcaatgagttccacttttttttagacgtaagtgagatcatgtcatatttatccttctgtgtctggcttatttcacttagcgcaatatcttccagacttatctgttgttcaaaatgttgggatttccttctctttttaaggctgaataatattccagtgtattcgtatgtgacatgtatgtatcatatgttctttatctacttatctgttgatggacacttagtttaatttcatgtcttggctattgtgaataatactgcaataaacatgggggtgcatatgcatcttcaagatattgatttcatttcttttggatatatccctagaagtgggattgctggatcatataatagttctgtttttagttttttgaggaatttctccacagcggctgtactaatttacatttccaccaagtgtacaagagtttccttttctctgaaagagaccagtaccagtccatggcctcttaggaactgggctgcatagcaggagktaagcagcaggcaagcsagtgaagctttatctgtgtttacagccactccctattgctcacattagtgcctcagctctgcctcctgtcagatcagcattagattctcctaggagggcgaaccctactgtgaattgcacatgcgaggaacctaggtggtgcactccttatgagaatctaatgcctgaagctccgtcactgtctcccatcacccccagatgagaccatctagcaggaaaacaagctcagggctcccattgattctacgttatactgagttgtataattacttcattatatattacaatgcaataataatagaaataaagtgcaccataaatggaatgcgcttgaatcatccccaaagcatcctccaccctggtccgtggaaagattgtcttccaggaaactggtccctggtgccaaaaaggctgaggaccgctgtttttgacaatagtcatcttgacagtgtgaggtgatatattattgtggttttgattcacatttccctgatgagattttatttttcatataaagatttgatcagatttaaatgctgatgggaagccattggagaggaaaacattttctgaaaatacagtcatgtgtcacttaacaagagagatatttgttgctgttgttttttctttctttccttccttccttctttctttctttttttatttttttttgagacagtgtctcactctgtcacccaggctggagtgcagtggtgcgatctcggctcactgaaacctccgcctcctgggttcaagcgattctcatgcctcagcttcccaagtagctgggattacaggcaccygccaccacgtccggctaatttttgtatttttagtagagatggggtttcaccatgtgggccaagctggtctcaaactcctggcctcaagtgaaccgcctgcctcagcctccaaagtgctgggattacaggcatgagccaccatgcctggccaacaatgaaggcatgtcctgagaaatgcattgttaggtgattctgtcatygtgtgaccatcgtagaatgtatttacgcaaacctagatggtataaggcactacactcctaggctgtatggtgtatcctactgctcctaggctacagacttgtccaacatgacactgtactgaacactgtaggcagttgtaacctaatggtaagtatttgtgtatctaaacatagcgaaacatagaaaaggtacagtaaaaatcgggtataaaagattaaaaatagagtgtaaaagataaaaaatggtgcacctgtatagggcccttgccatgaatggagcttacaggactggagtttgctgtaggtgactctgagtgagtggtgagtgaatgtgaggggcattactgcccactcctttataaacactgttatagactttatgaacactgtatggctacactaaatttataaacacatgaagtcattgtgctacaacattacaatggctagcacgtcactgggcgataggaatttttcagctccattatggtcttacgggagctgtggtatacacagcccgttgttgactgaaacgtcgttatgcggcacttgactgtataagaaagggaagatgtagtcccagctactcgggagactgaggcaggagaatcgcttgaacccgggaggcgcaggttgcagtgagccgagatcacaccactgcactccagcctgggcgacagagcaagactctgtctcaaaaaaaaaaaawaaaataaaaataaaaataaaaataaaaaaggaagaatctgtcagtgagcgaggtgtccaaaaggggtaagtacgggatccagagtagagtactggggtgcacaggtgggtctggaggtytggctgcaggaagcaaagctggttcctgccggacagctctctgggagcccgagtgtaaggccaacttaaaggaaggcagagcaggtcaactggggggcttgagaagtgaaaacaaagtggtccactggccagaatgggagagctgacaaggtaaacagaagattctgaggcagacacacgtagcccagatggaagcggggttccgcagacattctgactgcccctcctacgcactcacttttcctggctgactragccccagggtcaggaatgcaccactgagagaaggtagcccctctctctttctgccggatattggcaattctgctgtaacaaacacccccaagattttagtggcctaaactcatacatatttatttattgttcactgggtcagcatctctcctcaagtgcagattcagggacccaggttcctttcaccttgtgatgctgccagatgtatgacttacagaagaagcgagagggtgggtcattcacacggagttaggctcatccctttggtgtacatctcattggccaggcccagtcatatgccctcaactaacagcaagggaagctgggaaatgtagttttcctgcatgctgaggtggaagaatgacgtggtcagcacagcgcaagtctctgcctcagcatgtgatacctggaattatggcagcatggtacaaccatgagggcaactaatcggacatctgaggatggaagcgggggaagatgcaaagaacctgggtctttggtgacgtcgttaagcagctgatgtaatcagcctggggttttcctttctgtagattttttttttttttaaggacagataatttttttctactgccaaatttttttgaattggaaatttttctggttacttacaaccacaattggcatcattcaraaaccattaatttaattacwttacttaaacaacttattatacttagagtattatatttcatcatagggaagaagtggaacagtatctagtttattgcttagatttcaggaaactcascttgtttattcttgaccccagtgggaaaggggattcaaaatactttttgtctcagagttggggtagaattgaatatttgcatgacatttacatcctgtaagaaacaatcaagaatatgaccgtgctgattggcattttaagcagtctgtcattgactgaccgtaaatatgtgacctgctttacaaacctctaattcttcattcttttatttatcaagtacttttgtaggaccttctacatgcgattgcttctatcttcatctgctaggttgtgcactactgaagggaggtgtttctcttatttacttttatacccgtgttacctagcaaacaggattccacacatagatgggacataaataaatatttgttgtcagtcgctgtggctcgtgcctgtaatcccaacactttgggaggccgaggcaggtggatcacctgaggttaggagttcaagaccagtgtgaccaatgtggtgaaaccccatctctactaaaaatacaaaaattagccggttgtggtggcgggagcctgtaatcccagctacttgggaggctgaggcaggagaattgtttgaattcggggggtggaggttgcagtgagctgagatcacaccattgcactccagcctgggtgacagagtgagactctgtctcaaaaaataaataaataaataaattgttgaatgaagtttgatctgatcttcctggtagaattgaaaatgagtggggtttagacagtgttggaatggaattttgactttataactctcattrggtgattttggggaagttccttaatctatctgagcctcagattcctacttattgaggataacaatccacaagacagcatatgtaaagtgtctagcttatggcccggcacaaaacaggcccattgtaaatagyggtctttcttccagtatgttatatagatcaagtcgtttcaatagatgaatactctaaaaactcaaattttatggtaaacagttaagaaagtgaatccactgccagaaaattatgtaaagcacattgcaaattatatttggattagtttctctttggatgatccatgacagggttttctgctatttgtgaagatagttgagagtcaacaatctttcattttcactcacatgtacccagagcatctcccaaacacacaaatgcaaagaatggaattttctctccaatttccagatgaggtatttatctttgcggctgagctaaaggatagcttaaaatcgaatctcatgctaacactacgggctcgaccaactgttcttcttagtttaagtgatttctctcataactgagctgggcgacgcagttttatgacaaggttagacagcagtaattcattcctgttggtgttggctgtgcaggtgaggcagatggcatggcttgtgcttattttgtttggattagagagcgctgcactcactcagaagtcctcagttgagtcgcagatctgtgacttagtcacactgtgaccttgggcgtgtgagttcaaacacgccctggtttcagtttcttcttctgtacaattagggctttagaccaggtgttctggaggtgtctcgaaccctaaattctatgataggggtttctttgctgcttccttttccccttatttatttattatttcagtattcatgtctcaaataatttaaaaaaaagaacaaaagcatgtgtatgcacatagtcattactctattatttttccatggggggaaaaaaaggaaatagcctaagtgtccaatatgacagaaaaggctaagtaaatgataacaaatcaatcaatttggtgaaatattatccaatggtcaaaagggttgtttatgaagcctccctagcaaaatgggaaaatgtgtctgtctgatgttaaatgaaaaagacagaagataagtgatccctctgccatgataacaacactctaaaaaatacacagaaatatgtgtggattctagaagggagtgtgagaagtggaaacagttgatacattaaaaatatgatgattttctcacttctagtgggaggaaggaagtgttcaatatatttcaggtttccctttgggtgtcttgttttgtacatttatctaaggtgggctaattgggttaggtgccttaagtgctggaaggggctggggaatagctaacctcaagcaggttagagtccagtccttctctcttctgagtcaaagctccttccataataagagaggaaaatgatcaatgtgttcctcaaatagattgagctttgctttttattttcctgcctccctccactgctaccttctccttctcctccctcccttctctctctctctccgttttgtttgttgttatttacctttcccccaacacttattttcccattggagaaaaatgtacatataatgaaatgcacagctgtaacgcgtacagttccctgagttttgataaatgtatacacccctgtaatcaaccctcccatgaagatcatcaagatacagaacattcctatcacctcagaaagttctctgtgttcctttccagtaaatcacctgccccccagacaaccagtgttctgatctctatcaacacagattagttttacctgttctagaacttcatctcaatggaatcacatggctggcctcttttttttcggtctggcttctttggctccacattctgtttttgagattcgtctatcttgtgtgtatcacagctcattcttttttattcctagttagtatattcctgaatgatggctccaaagatatccaggtcttaatcctggaaactttgaacgttatgctgccaaagagattttgcagatgtcgactgaattaaagatctcgagatgaaggattagctcggattattcaggtggtccctagatgtcatcacaagtaagaggraggccaagggagaytgactacagaagaagagtagacaatgtgatcacagaggcagagactggaggagcgtagggggccgccagaagacagaaaggccaggaaatggattctttcctagagcccccagagggaaccagccctgccaacaccttgactttagcccagtgaaattgaatttagacttctgacctctagaactgaaaaagaataaattcgtactgtttttgttgttgttatttgagacagagcctcccaggccggatggagtgcagtggtgtgatctcagctcactgtaacctctgcctcccagctcaagggattctctgcctcagtctcccgagtagctgggattacaggtgcccaccacggtgcccagctaatttttgtgtttttagtagagacagggtttcatcatgctggccaggctggtctcgaactcctgatctcaggtgatccacctgtcttggcctcccaaagtgctggaattacaggcatgagccaccacgcctggcctgttttaagccactaattttgtggtaatttgttatagtgacaataggaaactaatataattttaaacacaatttgtttatccatgcacctcttgatacgtggggttatttgctgtctggaactattctgaataaagctgctaggaacattcttatgcaagtccttgtgtggacatatgttttcatttctcttgggtaaatatacctaggaatggaatttcagaggcatacagtagttatgtgtttaacggtataagaaactttcagttttcccaattagttttaccattttatacttaacagtatgagacctgaccatcttaaaaaacacatgcacacaaaacaggaaggttggggtcattcaccccaaagggtaagggactggtgggagtcaatccgtgtgtgtgttctggatgattctagaccctgactgtacttccagagtctcagcatgagctgtagtacagatttatgcctagattagtttttctttattttctttcttgaacaagaaatggttcacctgatacaccgctctcatcctcttcttccctcccgtgttcctgtgcttcctatcagcacgcactgtcctttccctgtgggcggtagtyacacccccaaagacctggacaacctagggaacaggagccagtgagtctagacctcagagtcctgagaacgacacagaaaacaagtctgcagtgtgctgcatgcctctgccgtgtggggcagtcaaccatattattcttcagttaatggaattttctttctcctctaagtaggaaaacaccagtagctcagatgccacccactgcagtagttgataaaacactcaaagaaaaggaagcagggagaaagaggaaaatctccctggatctgttttgttttgttttttcttttactttttctttttctttctttctttttttttttggtgggcagtgaggtgggggttcctgggtggggtgtagcagggagccgttttgttatttttgctttttttttcgcctaaagaaaatytgccaggtccccttccaattctgatcccactagatkccagaagtcttctgaggttaagctcaaggacaaagagatggttgttttccaggtgcaattttggtgagccaagctttgactcccgaaagagggtctggaatttggaaatcagctggtttgtccccycttgccccccagatttctcaaacttgttcagatcatagatctctcaaaacaaaatggcttatcagctcctctcatctccttccgtttataacacctgygtagtaataccttgcatagctcactaagcacacctccttccataygagctgtgttatattgtggtacatcatttggaactgctgagtctatatggaaatcctgatgtactctcgtagaccactagccacactgagagtgttggaaactaaagaccccaggtgtcctttggagccaaggacagttgtcttgtacaagatcagtggggctggacccatccatttgtgagtcctgaagtcgagctcaatgatattgtcttttgcagtgactgaaygggctcccatgccaggcctggctggatgttggcctgggagccctctttgcgcacggtggtacaagtcctctccctgctgtgcagaactaagagctctggaatgtgggcacagcatgtggtataggcacatgcctggtcctctgcaggtttagaacaagtttgcacagacatggagacctcatgggagggacagtgcattgctttgcaaaggaaattatttggacaagccctcagctttcatgccaagcaagaggtagaactactcagttaacccaccttggcatgaaagtgctgccctgggtgtaaaggagacttttctcccaggtatccttctatattggactcataccagccccagacatttgttgtgccaggcatgacaatacatgcttgacctacgtcatcactttatcttgtcaccgtacttggaagggaggtgcagaaacagcagcgcaacttcttccaagtgcctacatttccccatcgccttccaagctaggcatccagagaatctgcaccctgtggttcygggatatgacagcagcagggtgtatgggcatgggcttgtcctctcaggttgagccagtttgcacaggtgtcaacaccccatgggtaccatggtgcagcctagcatcatgaaaagaacaggacatttgggtaaaatgataagaatgtgaatgtgaatcccgggcagtggtgaggatcaaaggtcaaaggggaccgtgagaatgaaggtgctttgtcaactgtcraggggcatacagatacggatgattcttgctcttggttgggaaggtaacactcattcaggcaacatgagagtactcgtctttagcagaaaatggtacccagtgagattagcacccagcaaggtgggtggtatacagagaggtggtcgtactaatgtggaggctggttcccattgacgaggtggggactcagtgaggagattgttactcaggaaggaggatggtacccagtggggaggatgcgyccaagggggagggttgctcagcagggaggttggtatccagggaggatgatggtacccagtgggaaaattagtactcactggggagactagcacccattggtgaggttgtacccattggaaagattggtaccagggggaaggttttacccaggaggaaggttgtacccattggagagactggtaccagggggaaggttttacccagggggaaggctgtacccattggagagactggtaccagggggaaggttttacccagggggaaggctgtacccattggagagactggtaccaggggggaggttttacctagggtgaaggctgtacccattggagagactggtaccagaggaaggttttcctcaggggggaggttgtaccctactggggagattggtaccagtggggaggtggcacccggggggagcttggtacccagtagggagtttgctgcacactgggagactggtacccagtaggaaggttgtaaccagcggggaggttggacctagtaaggagtttggaccttggagagtctcatcacctgatttaggctgtgaagcggactacgggcagaggtcaaataagatagaggtgacttgtgcaatttttcacatttaaataaaaaagcagaggcatggacaaatcttcagtaccctgcccacgttagatgttttagagcatccatttatccatgttggttttagatttctgcccaaggaagcctaaagtcaacattactgtgatcaaatggagctcacatttctcctgcctggaaatacctataattccttaaaacaatgtttcaatttaccacaagtctggtggcatttcaaagtgtaataaaaaacccaccatccttttcctgcctcccactcttggtgttctggagaagactgcggaacacacacggacttttaatcaaggggagacggctcttcctctgttttgtgtacctttgtctttcctggagtagagtgctgtgataaacctacagatgccggtgactcaggctgggtcatgggaagaagtgggcgagtcggagccagatgaatttgtggtgtgctttcctatccagctgacatgttgcagaggttaagtatggtggagttttaggccaatttggagccattcatttactcagtgagcttcatcaacccatccctcacccaccatgtgcctgcatttgcactggtgtttggcaggtacatctcgacctgttaaaatattgaactactttcacactggttgtcaagtaaccactgcctggataccttccaacctccccaagggcttgtgtccattctaattggttagtttctgttattacactgattgctgaatagttgacaccccagattatggaacaattaaaacaaatcctctcccaacaagggggtggcagatgccatgccttcctttccctggaaaattccccatgactctttcaggatgcaaggaggccccaactgctatttttgtttaggtgaytgagaaaaccaagtgtggagaagaaactccgttgacgtgataaaaagagcagaattaatatttgctatctctttttctggtgccaagaaagttactggaataattcaaccagataaaataagtagatatgtgactttaaaaagatgaagtttgtacaatgaggcagatgccatctggcccaggaggaatttagtgatggcggcatcattctcattaatgtcagaactgcccggggttgttgtctatttgtacagtctagggagatgttgaaggcaaaattcagaaagcaattctaattctgaggttttcaatcctgaacccacagttgatcaccataggcatgcccatactggaaacctcgcattagtttctgtatttttttcctggtgatatgtgatcaatacaaagtatttgaatacctgatgttacataytttcccccatctcagccaccactaacccttcccctcatcctcctcaagggaaycttcattaatgatttcatgtgctccttttctggcctttctaatgcctatatatcaacctatattttaatgcttaacatatagtgtctataatctgcttcttttcacttactgtatggcagacaacttctgtagcagatgatatggtgtgctctcagatgctgcttcagagtgaaggcactcattccccggctgtcaggaagctgactggtgatgggtcacaggtaagccctttctcaggatttgccattggcaaggttacaccttctctccagaggacaattcacatccaatgtttggccaatgtggagcatagaggctcagtcttccctctgagaagctccccagctccagagtttcctgtgggatcggctgagaccccccgttccacctgcatctcagtttgacttctctttctgtcccctcttgctgccctcattccctcaggtattcattgtaactgaaggcctttcccagtaaaatgccagcccacaaacctccaactcagatgttccccaggaatcagtctaacacaatgctcatcatgttgacatcttcaagcattccactatatagaatctaacaaacaatatgttgagtctcattcctataatcatgtttgatattttctgtttattattctttcttgtttctttctaatttttaatggatttaattttgtttcattttaacagattaatagtttcctttgtatttcttttcctcctggatcaaccctgttcaacagaagtatatcaaggccacatttgtgatttaaacttttctagcagccatgaaggcatgactcattggggatcatcttagaatcctgcttaccacacacgttaaaaaaggtttaaagaagcaaaattagttttaaaaawatgcgttgttattattttatagagacagggtctcactatgtttcctaggctggtctcaaactcctgggctcaagcaatcctcctgcctcagcttcccaaagtgctgagatacagtgtgagctactgcatcaggctccagattaattttaacaatacattttactggatctaatataaccagaatattatcatttcaaaatatatttggagtaaaaatgattatggatatatatatagagagagtgtattttgaaagccagtgtgtgttttatacttagagcacgtctcagttcgcaccagccacatttcaagggtttgacagccacgtgtactagtagtggctgctgcactacacggtgcacttctagagggttcaaagtttccattaaaattgtattctaggacaccagccaaaatggcaaataaggatctccgaaaattccctcctccataaaagcaacaagaacattatcaaaaaatgtcagaatcaacgttttcagaactttggaaattaaccaaaggcttgcagcaatctgggaaacatttatttaagaaaacagcagaatcttggtaagaacagggagctttgtggcactttaacttgccgtattcccatccccaccctccccagcaccacattagctgtgaaatccaacagcctgcaaaacracctgtgaccacaggggaaagtccrgcagtcactggaagggcttagagctcctcaaggcccattctcrgagaattgtcattatttgacctctctggtcacactacttgcaaggctgtttttatttgagctgacttagagctcatccagcacaaataaaagcagccttgagagtagggtcaattattgaacctcacagctgactgaggtagtggataacaagtgggatagayaatgtgctaaccaaaaaacataaaagaaaaagcagaggaatgggatgtccttggagagagtgggcgctttaaaaagttctaacaatattcctgggaatatagaaagccatacaaatgtttagggctgtgtggacacccagtgctgtgtgtgtgcccaggaaatatccaagaagaccctggctctcacctctggccaaccttgagcctctgctgaagcaggaagtgaaggctaagatggagctgtaaggtgcttggctgaatgctgaaggaaacacacgcagaacttcttggtaaagactgagagtcttattggttccagtcatctaaggaagtctttgttgaatcattaaatgaccactaagctaactggtcgagactcactggccacacaaaacaaagaatatacctttatagaattagttcaggaaagtcaccaaccatccaaccaaacaataccaattaaatagtaacaacaacaaacccagggcaaaatctgatttccagagttgctatgttatattgttttaaawgtctagtttttaccaaaaattatgaaacacgccaagaaacaagagagtctgtctcatatgcagggaaaaagacactcaatagaaactgtccccaagagggcacagacactggattttctatacaaagacttaaatcaactatgttaaatatgttttaaaaaccctaaaaaactaaaggaaaccgtggctatacagggaaaaatgtctcatatacagaaactcctaaggaatccacaaaacacaagatcaatatacaaaaatcaattttgtttccgtaagctagcagtgaacaacacaaaaatgaaattaagaaaaacaattccacttagtatccaaaaatgtttaggaataaatttaatgaaagaagtgtaagacttttaactgaaaactctcaaacattggtgaaagaaattaaagaagacctacataaatggaaagacattcctgtgttcatggactggaaaatggcaattttctccaaattgaaatcactataaaaattccagatgctgggctttttttttgttttgttttgttttagaaattgagaagctgattctaaaattcatatataaattcaagggatccacaatagctaaaacaatcctgaaaaagaataacaaaattggaggactcacatttcccagtttcaaaacataagctacagtaatcaagactgtgtggttctgacctaaggatagacatagacaatggaatagaattaaaagtccagaaataaacccatatatttatagtcaattgattttcaacaatagtgccaggacattcaatggggggaaaatagtcttttcaacaactggtgctgagataactggatatccacatgcacaaaagaagaaattggatcccttaccttacaccatatacaaaatttaactcaaaatggatcaaagactttgctgtaagactcttaggagagagcatagatgtaaataatcattacctttaattaagcaagtttcttggctatgacactaaaagcataagcaatcaaagaaaaaatagataaattggacttcatcaaaattttaaaaatctgtgcttcaaagtacacgatcaagaaaggaaaaagacaagtcacagagtgggaggaaatattgttgaatcacatgtctgataagggtctagtatccagaatatattgttggggctcagaaaacattacccccaaataggacactttgacatgaagcaacctcgaggtctctctgacctccctggtccctgcacccgactattcctctgtctctctcaaagcacagaatgtagttgttcactgaaattcccttatctacctagacactgaacctactaaagagaaacacaattgccttccctgaaatttaactagagaagaataaactcataacacagaggaagagattgaaaattaaacaccagacaaactttgtcccaaaccactgtcttctctctgtcccattcaatttccaaagaaaactatttactaaccattgtctgagcattagacccattcatttcccctaaaaatcatttactatccctcaaatcagccacatttccccatgttctttttccctatgaagaagaatatataagcatgtgtatccctttgggttactgggtaattattctcctgcaattccaatgtgatgtgttaaaataaatctgtatgcttttttcttctattaatctgcctttgtcagtttattttcagcaaaccttcagagggtgatgggggaagagttctcttcttccccctataatataaaggactattacaactcaacaattaaaagacaacccagattaaaagtgggcactatagtcgaatacatatttttccagtaaagatatacaaatggctaatgagcacatgaatagatgctccatatcattagtcacagggaactggaagttaaaaccacagtgagatatcatgtcacattcactagaatgactattatcaaagacagtcaataacaagtgttgccaatatggagaagctgaaccctccatacattactggtaggaatagaaaactgtgaagctgctttgggaaagagtttgacagttcctcaaawagttaaacatagagttttcatgtgactcagttgttccactcctaggtacatactcaaaagaaatgacatttgcccacaagaaaccttgtatgtgaatgttcatagcagcattattcataatagctagaaaataaaaacaatccaaatgtccatcaactagtgaacagataaacaaaaggtggtgtacctatctaatggaatacttttcagccataaaaaggaatgaaatactgattcatgatacaacaggaatgcaccttaaaaacactgtgctaaattaaagaagccagacatcaacagccacatactgtatgattccatttacagtagcccccccttttctgcattccaagatccccactggatgcctggaactacagatagtacccaaccctatgtatacgatgtttttcaatctgataaccaagatggctactaagtgactaacaagcaggtagtgtatgcagtatggatatgctggaccaaggatgattcacatcccaggtgggacagcacaaaatttcatcatgctactcagaatggcgtgcaatgtaaagcatatgaattctttacttctggaattttctacttaatattttctgatcatgattgaccatgggtaactgaaactacagaaaatggaaagtgcggataacgggaactattgtatataaaatgtctagaagaggcaaatccatagatacagaaagatttgtggctgccaggrcctgggcgtggggagacaggaaaatgggagatgactgctaatgggtgtggaggtgctttctgcggcgattaaaatgagataatgataatgtttgcacaactttgtgaatatattaaaatgtattaaattgtaaactttaaaaggtgaattttatagtatatgactatatcttaatttttaatatgaagtattttttaaataaaagaaaatattatattctatcaggcattcttaaatttttaacaaatctattttttatttctctatcgacatcaaggttgaaacagcatatgtaaccctccttcccttctatcatctctgcaacgcaagaaacttaacatgctttcattctcctagtcacctctctacaatctagattttcttgttgatgatgatgatgaaaagaatctgtaattattacttgttgaatgttaagtaccatgtatcatgtttattttataagcattatcttatttttcccaaggtcttaactactacctcaaactacctctcagactgtttagggatttttaaaaacattatgtcttctattttaagcctcctttaaacaattttaaattaaatggtacaactactctgtcaatgaattttttgtattggtttcttaaagccccttctgtagcttctgtgataccacataatctcagtgttcttttgcctcttggaggttccctctcattctcttttgcttagttgtcctcctgttcgtcacccctaaatatcggggtgtccaacactgagtcctcagagtgcttctcttttcacttacctgacaccttgggtgatctcatctggtcccatggccttgaacagcaccctttgcagataattctcaaatttgtatctccggtcttaacctctctcctaaactccacctgtcaatttgacatgttcacttggatgtccaataggcatctcaaacgtaacatgtccaaaatcaaactcttgattctgtccccagacttgctcttcctccagtgttctccatctttgtgaatggcacctattcacccagttactcaggttgaaaactttaaaatcaaacttgaatcctctctttctctcacgctctccaaattcaatcctgttggttctaccttcaagcacatctccagttcctcactaatactgtcctggcccagagcaccaccacacttctggaataccacagtaggctattttttttttttttttttgagatggagttccacttttgttgtccaggctggagtgtaatggcacgatttcggctcactgcaacctctgtggaataccacagtaggctctkaccagtcttgattctttccttcttgcctccctatcatcttgtctccaaactgaagaccgagtgatccttgctatagtttctcatcacatggggtctgcagaccttaggcgatctggctcctgggcaccactcccattttacttctcactgttttctttgcattatcttcactccagccacactggccttcctattatttttgtttgttttgagacagaatcttgctctgtggcccaggctggagtgcagtggtatgatctcagctcactgcaacctctgcctcccacgttcaagcgattctcctgcctcagactcccaagtagctgggattacaggcacacgccatcacccggctaatttttgtatttttaatagagatggggttttgccgtattggccaggctggtctcaaactcctcacctcgggtgatccgcacacctcagcctcccaaagtgctgggattacaggcgtgagccactgcatctggccaaattattmttatagctcagttttctaatctgtgtaatagggataataataataatwcttactccatggtgatgttggagtgattaaatgagacactatatctagatttgttcagaatagtacttgaatcagagtaaatccacaataaatgttggctattattattacaattacacactggacttttttccttgatgtctttattctgcttcttctttcttaatttggttattcttagaaagggtaaaaaataatgaatgttctattttcctgcattccaagtctttttctttgattatcacatgcttgaccaatagtaaatgctcaataaatgtgagctatcaggttggtgcaaaagtaagtgcagttttttgccattaaaataatggtttttgccattacttttgcaccaaactaataattatatttagaatacacaaaaccttccctttctggttattcttactctgatgcatttctattggattaccctttaagtaacttcagaagaaacaaggggtcttcatctttatacgtaatcttcttcagaagaagtttaacttcagaactttaacttcagtaacttcagaactttttagaagtttaagtaacttcttcagaagaaacatgtaatcttcatytttatatgtccaaacctgtctcccttttacaatcacacatgaatcacagtttggatgggaagagatttctagaattacctcagaatttggtcaatgttctcaatacgtagtcctttgtttttgtttggaagtgtatggaactttctcttcatcttcaagattcaggaatttcaccatgacatgttttgttggctctcttctttagtattcctgccgagtgtttggtgggtccttttgatgtaaacgctgtgcccggctatttcctttctttagtgaaaggaaattttcttttattattttttgcattatggcttctcttctaagtgacattgctactgaaactcacttaagtggctgactcttagatcgcgcctcatgtctcatatcttagtcttaaaatatctatttctttggtttgcatttttggagaatttttaaaagttatttgtacattaaaagttatttgtacattgaatttcagaagtgttcattttgctcttcagtgccccaattgaagttgctttgatgtactttagaattttttttctgagagatattctctatgtgcatagcaagttgcattttgaatgtaaaatcttcagaaaaataaataaggatgaaaactaggaatttttgagtttcctcatgttttctgcagtattcccaatgtctttatgtytttctatttccaatggctctccaaatgggtttacctgtcgcattgcactagacttgttcactgtagaattgtataggggctcctggagttgtcttcaagttagtgcatgttgcactatatctggacaatattcgtcagactttgtaacaaaaggtggggtttttcttaggtcctgctaaaagtagttttcttctctattttaatctcattttgcttgtttccttctctacagtttttataaatacwctgtgacttcatagtttcacttttaatatgtacgtatattaagttaacacctcaattttttttttttttaaagacggagtctcactctgttgcccaggctggagkgcagtagcatgatctcggttcactgcaacctccacctcccgggctcaagcaattctccttcctcaacttcccaagtagctgggattacaggcatgcgccaccacacccagctaatttttgtatttttagtagagactggatttcaccatgttgggcaggctagtcttgaactcctgacctcaggtgatccgcccgccttggcctcccaaagtgctgggattacaggcgtgagtcaccatgcccaaccacacaccttaattttttttttttttttgatggagtctcgctttgttgcccaggctggagtgcagtggtgcgatctcggctcactgcaagctccgcctcccgggctcatgccattcttctgccttagcctcctgagtggctggggctacaggtacccgccaccacactcgcctaatttttttttttttgtatttttagtagatacggggttttaccatgttagccaggatgggctggatctcctgaccttgtgatctgcctgccttggcctcccaaagtgctgggattacaggtgtgagccaccgcacccggctggcacaccttaatttttataacagcagagactacaatggaggctggtataaaagggtaatacttctttattattcaagggttgactggtgaacagtttcagttgtgccctgatttttcctatcttaggatattatcttagtgttttatcaacaaacctttcagagcttctttttgtgacatttctgcaatattgagtttatatgtactgtaggattaatctattattgctctatcagcattcttgactgagttcttctgtgtaactatgaccattcatgtgctatgagaaatttggaagtgtcatatttgtccttaccctcagaaaacatatagtttgattggacaaagcaataaaatttaaaagtatataatcaagaaaaaattagaatgcagagataaaaataatagatgttcagagaagagagaaataagtgagggatgagatagtcatcaaatatacatggagactgtgaaaccttgtgcagagccttgatggatgcgtgtggcttgaaaaggcggcaaagtgaagtctggctttactgacgagagaaacaaggaaagggtttttgtgtgacagtaaagattcaggcctgattatctttaaagtagaacaaagagtcagaaattcaaagatggacatcactacagatccaataggtatcaaaaagataaggagatcttgaaactttatgcaaaaaatgaaatgggacattccttgaaaaactcaatacttatcaaaatagatttaagaaaaacagactatctgaatctgaataattggtaaagaaattaaattaattattaaaaaaaaccccaaaaaacaaaaaacaaaaaaccaggccctgaagtcttcagcaacgaagtataataaacatttagggaagaaataacaccagtcttatacaaatagccccagaaaaaagaaaaaaataaattccccagaacctgacatatgaagaaagcgtaaccttgccaaagatattacaagagaggaaaattcaagacaatcagactctagcacatagaagcaaaaatcccaaacaaacaccagccaaccaaatctagctatgcaaaagatatcatgaccaaattaaatttgttccaagaatacctttagaaaattaatcaatgcatttcactatattaacaaaacaaagaaaactatgactatcccagagatgcagaaaaagcttttgataaaatttgtcgttcataaaaaatattcttaatggaagagaacttccttaatcttataaaggttatctgggggaacctatggcaaacatatggtgaaatgttgacaggtttctctttgaaaatgagaataagatacagatgtccactctcattcctattaaacattgtgttgaatctcctagacaaaygaagaaaagcaataaaatgaaatgaaagatatatgaagtgggaaggaaaatataaaactcattattcatasatggtatcatagtatacgtaaaatatccaaaagaacatacaggtataaaaattcaaagggcccaaaatagcaaaacactttttagaagaataaaaagatggaaggatttgctctactggatatcaggttatcataaaaccacagccatttacatagtgtatatatatatatatatrtawgtgcataagtagataaatggatcaatcaaagagaagggagaaatctagaaacagactcatgcgtattttgacactcgatatttcacaaagttttcttcaacaaatagtgctgggactactggatatccatatggaaaaaaattaaacttgatccttatctcacaccatatgtaaaattcaatttcaggtgaattgcagatctaaatgtgaaaggtaaaataaaacttctagttgatagcgtagtataatatcttcctactctagtgtacataaagacttcttaaacagggctcaaaatatattaactattaaaaaaattacatttcactaaaattaagaatttttgttcattaaaagatgacagtaagagggtgaaaaggtaagcaactattcagaatacacacacacacacacacacacacacacacamaaamamaaaactcttacaagccagtaagaataagataacccagtagaaaaagggacaagacactgggatgggtacttcataaaacaggctatccagattaataaacctataaatcagaaatcagagaacttatagtttcaatgagattcaactatgcatccatcataatggttacaactaaaaagactgataataataactgttggtgaggatgtaaagcaaagggaattctcatacatggctggtaagagaataaattgacatagccactttgaraaaacagtttagcattctctattaaagtagaagatatgcgtatattatgacccaacaattccactcctagatatgtgcccaatagaaatgcatgcacgtgggcwccaagaaacggacaagaacagttaaagcagagctgctcccaacagcctcagaatttactcagcccaattgtccttaacagtaggatggataaataaattgtggtgtatttactgaataaaatacagtagctggctcacacccagtactttgggaggccgaggcaggcggatcacctgagggcaggagtttgagaccagcctgaccaacatggagaaattccgtctctactaaaaaaatacaaaattacctggccgtggtggcacatgcctgtagtcccagctactcgggaggctgaggcaggagaatcacttgaacccgggaggcggaggttgcggtgagccaagattgcgccattgcactccagcctgggcaacaaggtagaaactccacgaaaacaaatgaaccttggctgcatggagcaacatgragaaatctccaaaaatgattttgagtgaaagaaaccaagcacaaaagaaggtgtactgaaagattccatttatatgaaattcaaaaagcaaaactaaactctaatatttaagaatacaagttgtgatggtaaaactgtcttttaaaaaatcagggaaatgacttccataaaaatcagggtagtggctactttaatcagagagggatggtatggtgattggaatacagaggaggtttctggaatgctggtaatattttatttcttgaatagggttatatggatgttcactttgggataaaccattgagcgatacatttttgttttttccctgttctatatttgttttaacacacacacacacacacacayacacacacacagacatacacacacacacaaacatatgygcacacacaattataaaaagaaaaaacagaatggttacatatactaagtacagtaaattacgaaatgctgagtatcagtctttaaacatgaagtagatttatacatagagatttggagagtttttgaagctgtaccattaccactgagaaaataaaacagtctgcagaatgatgcacacaatgcaatacatgtatatcaaaacaatgctatacatgtttacatatacagcacagtcatcatgcatagaagtacatagaattaatttcagaggcatacatccagtctaaaaacagtgattacttctagaraagggactgagtatttgctgagagggctatccgtatgaytggtataactaaaaataaawaaacaaaagaagaagaaagaaaggaggaagagaggaaagaggggagggaaggaagaagagatgagcaaacctagaattttgagccaggccccccaagatcacaatggagatggtattgagcagcttcatctagaatgttccttgaacatttctttcctacttccacttttggggttgccataaattttaagaatttgttcattcactcattcattcaacaaacatatatattattgtgtttcctaaggcagagctttcgggagttttcgtgtttcagtccagccaccgagtgggccaacatttgatgatcacatgaaaacctcgctccaataacattcaaaatcttcaccatgaacaggtgctgggtagatcatgtttataagaattgtgtgcatttctgagtgtttagaattgtatgtgtttaggctgagcgcattggctcatgcctgtaatcttagcactttgggaggccaaagcaggcggattgcttatgtccaggagttcaagaccagcctgggcagcatggcaaaactccatctctactaaaaataaaacacaaattaactgagcatggtggtgcctgcctgtagtttcagctacttggttggggactgaggtgggaggattgcttgagcccaggaggtcgaggttgcagcgagcctaaatcgcaccactacactccagcctgagtgacaaagtgagaccctgtctcaagaactgtgtttttatttattaagttaatcaaagctttaaaagtctcaaaagataacaatggctgagcagcttgtaggactctgggaaactgcaggggaaatactcatgaaaccttaaggagtaatttaatagacttagagatgaaaacgaaaccccaaggagacagcccaggcacagtagaaagagagacacacagttgtaccagtcgtttagaagcagatgtgaacgatggcccaggtgtgacgatcatggtagaacttgatgcaggacatgtgtgtggcaggaaatacaggcatgttttcacayattccatcaggcacaaatgtgctcttygtgtccaagagattatcttctaaacttggcctttccagtggcacatgtcagtaaatctctgatacttgactagatctgcttctagaaacagaaagaagcttcatctttctttccatcgccacagcctccgggggtggcctccctctcctaccacccctaccattcattctccatctgcagttggcatgctcctttaagagtgtaaattaggggccaggcgcagtggctcacgcctataatcccagcactttgggaggcttagcgggtgaagcccttgacaggagttggagacaggagtttgagaccagcctgggcaacatggtgaaaccctgtctctactaaaaatagaaaamattagccaggtgtggtggtgtgtgcctgcaattctagctactcaggaagctcaggcaggagaactgcttgaacccaggaggcagaggttgcagtgagctaagattgtggcactgcactccagcctgggcaacagagcaagactctgtctcaaaaaaaaaaaaaaaagagtgtaaattagataatctttcttccttgcttaaaactctgcaataggcctggcatggtggctcacgcctgtaatcccagcactttgggaggccaaggcgggcggatcacgaggtcaggagatcgagaccatccttgctaacacagtgaaaccccgtctctactaaaaatacaaaaaaattagctgggcgtggtggcacgcgcctgtaatcccagctacttgggaggctgaggcaagagaatcacttgaacctggaaggtggaggttgcagtgagccgagatcatgtcactgcactccagcctggcaacagggcgagactctgtctcaaaaacaaaacaaaaccgaacaaaaaccctgcaataaggacaatttttattaagtgttggtgctgtattcatattttctcatgtaatcctcctaagtctccaagcacctcagtaccgtcatcattcccaactcactgatgaggaagttgggcttaaggggggcctgcccaggccgggtgcagtggctcactgtaatcccagcctgtaatcccagcactttgggaagccaaagtgggcggatcacctgaggtcaggagcactttgggaggccgaagtgaggggatcayttggggtgaggaattcgagactggcctggcccagatggtgaaatcccatttctaataaaaaatgcaaaaattagctgggcgtggtggcaggcacctgtaatcccagctacttgggaggctgaggcaggagaattgcttgaacccgggaggcagaggttgtggtgagccgggatcgtgccactgcactccagcctgggtgacagagtgagactccatatcaaaaaaaaaaaaaaaaaaaaaagaaagaggggcttcccaaatcactccagctaatgtggaggctgctctcccacctccaagaatgcctcctcctcccgttatgatgttttcttcayagcatttatcactctctgagatttccacttatttatgtgtttacagtcagccttttcccactagaatagaagccttaagagtagagggactttaattttttcactgccatattccctgtgccaaaatgatgcctggcacatagttggcattcaataaaaatctggcccagtgaacttcatgctactctgaaaagtttattaaatgtatccaaggtgaccaagacattaacctgcatttataatgaactatataaataaatgtagtcaacaaatattttattaactcaaaagtaagaatgatctgtgttatcttcacatggtttgtttaccaaatacagaccatataccagtcgtttttaggcaccggtgataaaaacacccaggtccttatcttaaggggctcataaatgtgtgtgtgtgtgtgtatgtgtgtgtaggaagtgggtgggaaagggaatataagcaagtaaacagtgtcactacactgtgtggtcaatacaattatggaggtaaacacaggtgcyggtgacataggggaagggcaggtagatctgaagggggatgaggaagggtgttgrcaaagctttcgagaggagctgagaatacagttgagttgggaagaacaaatagtgattatccaaagaaagaatagggaagcgtaaatagggctggagaagcaacttgttctgggtagggaagcaccatgcttcgggagctgcagggyagtgagtttaacggtggagaatacagctgggatgtggtgagggatcaatctcggtgtgcatggtgcagcccttcgtagatgaccctgatatcagtggacatcacttacccatgtctgctttattttccagtgggttcccagtgctagtgtggtgcctgtcagatggaaggccctcagtaaatatttcctgaatgagtgaatgaatgaatggatttggaatgttacccccagtacccctcgttccaggaggcagttagagttttacgtaaacagaratgtgatctgatcaacatgctgtttgagaaggaccactctgggagcccgagagtagaagagggaagacccgggtcagtgaggcaggtaaacaagtgcgtgtgggagtgcatttgagggctgtggagtgaggtgggtggcaaggaaggaatggatttgagagctccttggtgacctactggatggaagtaagaaataaggtcacctctaggaggttttctgatttctggtacaaggcctgggtatgtggtggggccattcacaggacatragactggaggtggcgcagcctaaaggcaagatactgggttcagctgacacctggaacacccaggtagaaatgtctaatgatcagccaaaacctgggcctggggcccaggagacaggtctgggctggaagaaggtctggacatcagcagggtctgggcagtgctggaaaccagacagtaggaggagagcactcagagagggagccctgtggggtgggcacagcagtggtcttgggggcagatggaaggaatcggcagaggtgacccaaagctggctagctggtggcagtggaaccagttatggtttgggggggtggaacaagttatggtttgggggaatcaatggcagctgcaagaggaccttgtcattttcacctgcaatagtgaaagaatgcccaggttggaagctgaaaaaataaaatccaagatagaatgaggtgggaggaatgggctgaggcaggcagcttggaaccaagaaggaagtggatgctggaactccctttttatatggttccctgggcgaagtgcagggtgaggtggctttcaggaaccattgggatgaggcggtttctgcctttgagtaactttccatgccaccacccaggagattagagcttcttcttctttttttttttttttttttttttctgagacagagtctcgctctgttgcccaggctggagagcagtggtgtgatctcggtgcactgcaacctccaccaccctggttcaggcaattcccctgcctcagcctcccgagtagctgggattacaggcacatgtcaccatgtctggctagttttctgtatttttaatagagacagggtttcactatgttggccagactggtcctgaactcctgacctcaggcaatccacccacctcggcctcccaaagtgctgggattacaggagtgagccctgtgcccggccagagcttcttttaaaaatatgtgcctggggtcctggccttcacctgtactttgcctgtaattttccacctcttggtctttactgtatagcacttgagcaatcagctgttcagggtggtacagctggaggcaccatatgcacttcggcaattacatgtctagactcattacttactttcttttggcactgattccacatgattcgggcatttccaatcatccctagttccacttcttagatcttctgacctcctggcctagccctggagaaattttattgcagtgtttcgggtactgagaacacaggatccttgctggcctcagtttcccgtagctctgatttttttttttttttttttgagatggagtctcgctctgtcccccaagctggactgcagtgtgtgatttcagctcactgcaacctccgcctcccaggtttaagcaattctcctgactcagcctcctgagtagctgggactacaggtctgcaccaccatgtctggctaatttttttgtatttttagtagagatagggtttcaccatattggccaggctggtctcaaacccctgatctcaggtgatcctcctgcctgggcctcccaaagtgctgggattacaggcgtgagccaccgagcctggccccctagctctgattctaacccgaggcctgctcagcactgctgatgccctatttggaaaaaaaacatttggcaatggacccaagaagccatcagtttcaagaaattccgctttggaaggccaagcaaaggaagcattcctaaatgcagaaaaagccagagaacaaagatgttcatctagggatttgctatacaaatgaagagtgaaaaagtgtcacctgaamcatccaagagcaggggaaagattaaatggacaccggcatttcctggagtaggatataacacagcaagtctaaataacagttatgaatgttagttaaaaacattgacaagctcatgattagatatcaatgaaaaaatggaatataaaattatatgtaccgtctgattaaataacacatatccataaaagtttagaaagaaacctctaaagtgtcaacagtggctcagcttggattgtgggattatgggcatttttttgtttcctgaattttccgtagtaaggttacagtaatcttacaatagcaaaatacaaataacaatcttttaaaaccctgaagcctaatttgacaggtacctcctcttctcaattgtccctcaagcatgggctgtccctgtcctgtccccagcctggccttcctgctccctatgactcgattcctcctcttggcttatctattgatctggggaggttttacagaggctagccagaagcttgtgggcacaacctcctgggcggaaccagaccccctccctggggtagggcagccaaggctctctggttttgtttttgtgtgtgtgtgtttttgttttattttgtttttttttgagacagagtctcactttgtcacccaggctggagtgcagtggcaagatctctgcaacctctgcctcccgggttcaagcaattctcatgcctcagcctcctgaatagctgggatgacagacatgtgccaccacacctggctaatttttgtatttttagtagagatggggttttgccatgttggccaggctggtctctaactcctggcctcaagtgatctgtctgcctcagcctcccaaagtgctgggattacaggtgtgagccaccgcgccccacctcaggggtgttgacttttaaaatgtgggaagaagacaattaaatgagggctttaaagctttacatgcagtgagcaaggaagcttctggaaagcatttgaggcccatttcccacgacttgtccctgacagtagctatgaaaatcccggggtggggctcatgggagtgaggtatgcatcctcttgtgggacgctctggctgagcagcgcaggccaagagacttccaggccacaaggaaataacaccatcaagaccggagcgatggcatcacgggtatcccctcaggaaaaactcagaagctggcacagaggggcacgctggctgaggtggggtaagcttcctggtactcgggaggtctgctaacaagaggacaggaaaggagactgggactggatggcgtggtaagatagggacctgggcacagggatgggtcaccagtgtgtgttgtagctgctctaggcagggtaaatatttcccacctgaggagggagaaaaatgccagtggtgttgcaatgttactgttttgcacagctgcggacccagaaaaggagaaggacaccctttcctgccctactctagattagaagattcccgctgtcttctattcctccccagctgtttgtgtttcaggccttctgagggggatcatgctgaaggcacctccagggagagaggatgtggggggagcagcaatggcagagacctrtgtcccaaatggaacccatggctccaaggctgaggctcctcaagcctccagctagaccccctttttcctcatctccctccctgggaactcaacctagccaaaggcttcaggtaccaccctcagagggggcacagaggttgatatccccagttaagtggggacagcccaccatctagagcaggggtgtccaatcttttggcttccctgggccatactgaaagaagaattgtcttgggccacacataaagcatgctaacactaacaatagctgatgagttttttaaaaaattgcaaaataaactcatagattttaagaaagtttacgaatttgtgttggactgcattcaaagccatactgagacatcctgggccacactcaaagccatcctgggctgcattcgacccatgggccatgggttggacaagcttgatctagaggaaattcctaccttattctgccagcaaatatctattcatcaccctctgtgtcaggcattgtatcaggggccaggaccttaccatgattagaccaaggccctgttctctggagcttacattctactgaagcctcacggcactgcaaacccattatgtgctgcaggctaacactgatggagccgggcactgtgttagagccaaattagagctccttacatcccttctgctcattaggatctgcttcttctcagctcctggagtgccactgagccttcaagtggagtcaggtttccccagctgtggaaagaggggacatctggggaataagagtcaagcagagcttggtgatctgaatcaatttttcttttaaagcattgggcctttgtagcaataatggcaaaccgctattaagcacttcccacactgcaggctgcactgtactttccgtgtattgtgtgtggtatattggacacgaccctatgcctyaggtctgattatgttacagatgaggaaactgaaccacagagttcagttacttgttcaagggtacacagtcattggacacaggcggtctggctttggctccatgctcttgaccaccaagctgtactgctgccaactagccacctttggtgagacctgctctgcctacaattctcttggatagttcttctcttggaagcaagaatttgtatgccatcactgtactctcgtggattcagatggatctgaagatggatgtcaagtgagattcctcctcctgatcagagatggtggtatctgctgtcacttgaacttggcatgtgtgtcctcaggatacctgggctatgggctagccatcttccatggtgggcatgtagaggcagagagtgcttgtctccaaacagacaagatggcatggggagggtggggtgatgtcagacacttcatgagcagagcagagacaagatacatgtagtcccagagaaaccaaggatgtcttgtctagttccccaggagccctggatgtacgttctgttactggattstaggatgcactcttgagtcctttgatacatccttgtttttacwtttttaatgtaataattacaaaatgatggccaatgagattggcgaaaatataaagagtgttgcaaatagcactcattcaacgaatcctaatctttcagcaaagagattagcctggtgtgtgtatgtatgggtgaaagtgtgcatgtatttgtaggatctgcccactcaaatcaggtgatgaaaagttgacagaggtttcaattaagattgacataaggtgaaatttgaaagccacccagaaaacacatgatacactgttatgaaactaaatcccagggcaaagatgtgggcacagagggactctcttgacacagctgacaagttccaactctactattccaactccagtattcatggctgctcaggcaaaatcattctggaagtacaaagcacctgtgtccagatttggtgtttacttctctaccaagaacttgaatttgtaactgagtcaaggtcctgaatctgccaccagtagactcagttcactggagacagcaactctcttcccctcagttgggtaagggactttgcaaccctgggaaaatgtagagactagtgtagaatcaatgaggagcagaatcaaaaccagaatactatcatattttactgattctaaggtgcacagtgttttacattttaccatcttgggaattagaatgcattttacaatcgatggcatcaggccacgcacagtggctcacacctgtaatctcagcagtttgggaggctgaagcaggtggatcgcccaaggtcaggagtttgagaccagcccggtcaacatggcaaaaccctgtctctactaaaaatacaaaaattagctgggcatggggtgggcaccctataatgccagctactcaggaggctgaggcagaagaatagcttgaatctggggggtgcggcatggaggttgcagtgaaccgaggctgtgccacttcactctggcctggcaaaagagtgaaactctgtctggaaaaaaaaaaaaaaaaaaaagaaagaaatcaatggcaccatatgattataaatggtgatctaaaataaaagttgaaaatttccaaaaaattataaatgtttgtgttttttctaccttagtgatatcctaaaaaaaaagttgaatcttatatcttagattcaacaaaatatagcactctgctttagttagtttaactgtctctcccaaaaaaagtgtgatgaaaacttaattcccaatacaacagtgttgtgaggtggggcctaatgagagggtgattcaatatgagaatcaataaaatatgacaatactctggttttgattctgccctcatgaatggattaatgctattattgtgggagtgggttccttacaaaaggatgagtttggcccccccttggcctctgtcttgcccttccactttttgccatgggataacacagcaagaaggcccttgccaggtgctatcttcttgatcttggacttcccagtttccagaactgtgagaaataaatttctattcattataaattacctagtctgtggcattctgttatagcagcaaaaaatggaggaagacacactctttttgtggtaaggttaggaataatttttaaatcatcactataatcttttggttatttaaagagattggaacatggaagaaaatctaacatagtagacagcctggcatattacacttgcaattttaatttgaaacatttaagaggatataattaattgaatttgtagacagtctttggaagttgtattattggggtacaatctaaccacaaaatgtaatggctcaaagatgatagaagtttatttcattttttgttaacagtcagtagtgaaatggtccagagctggaggccaagcagccttgtgatttgaggtcttctaaggaattggttccttctctcctttggttctcccttggcctagggtgttatcttcataagcatggttgatggtggctcactaccacatcaacgggaagtgggaaagaagaaagtctatggcaagtgtctttaaggagatgcgctcattgtagcacacatcatatctgctcatattccattggcccaaacatagtcacatggtgacagccagctgcaaaggagcttgggaaatgtagtctgtggttgtgtggtcatgcaactagttaaagcttaagggttttagctaaaaggaaaagaggggagaattaacactagaaaacagtcgatacttatccaccatgaagcttaagagaagctcattccctagatttattaaatttcaataatcgcttaaaggcttagaaagatcttgtcaggtttatgagtttgccatatcaggttgaagtgttttagagaatcagatatattttaatttcaaatgcactaaaaatgtcttaggaagtttaataaagaacagaaatttattgtctcatagttctggagtctgggaagtccaagatcaagatgctggaaggttcagttgtctggtgagggtttgstctctgcattcaagatggtgcttttgagtgctgcatcctctggaaggaggaatgctgtgtcttcacatggtggaaggcagaagggcaagcaaggtgtattcactccatcaagcccttttaaaagggcacctaattccattctagatggaggagccctcatggcctaatcatctcttaaaggccccaccttttatcacattggcaacacatgaatttttcaaaggacacattcaaaccatagcagaacctttggacaggtttctattacttatgaccaaaaaaccctgaggaagacagtttctcctccaacccccttatgtttctatgtgtctctgtgtcacagagctcacagctacatttctaaaattatgacaactctcaacacatgcatgaatggaggagacacccatggtacccattggttgcctgtctagcctcccctttgctgcaaactgtttctccttagctataacctcccaaatttgtagggttcagaggtagttattagcagccacagtgatatgatttgatctactctttagacctggctgattggcccaagggtggaccaatgaaccagtttaggctaatcaagtgccaattgaaggagagccttggagtatcccttggtgtttagagggattatatgtagaccaaggagctgagaatggctatcatctattgtgcagatgggagagcagagaaaaagggccctttcagagagagaagaaagctgactggcagagaaacagaaaaaaaatgtggagagcatcttggttctagtcagttcctgagactgtcagctgcatattgcctcgagtcctgggagacatccggtacacttataataatttatctagagtcagtttctactatttgtaacccacagaattctacctaatacgcctgaaaatatattaaactcattgtgtaaagcaatcttgtgagttttgttttcgagagagctacttagttgtctcaattagtggaaaattccagtgcagatctgacctttgggtttcagagtacagggactgatccaaggcatgtgccctggtaagcccaaaaaatcaagcttacctaaaactcaactctttcagtaactctagcctgataatcactgcaaaatacccaacaatgactgagtgttagaaagttataggcaactaaccatttttgacttgtataacatyttattatacttagaataacttatagggtgatatccaaattgcattatatggtctatggcatagactgctagtttaccgtactctgcaacgtaaagctacatttcccagcctttcttgaaggcaaggcaggtccacaggaaggacaaagttctgatccatggaatatgagtgtaagtgatgggttcaacttctgggccacttctttaaagggaattactcaagtcttttttctattttgccatactgttcctggaatgtgaacatggtgctgggagcggaacagccataaagaaccatgagatttaagccatgtcttgtaaatagacagcaagctggaaaaagcctgagtcccatgccctggttacattcagatctttccacgagagacaaagtcttgtttaagtcactgttactttgacttttgtttcagtagctgaaccagtaccctggctataatatagtctttgcatgggaaaacaaaaaaggaatgacttttattgagtcacaaatggtctaaatgtgggcagttgtgcactcttggaaaaagcacccaggctgcagaaacaacttagcccatgtgagatgaggagtacccatctcacaaggtggaggaacaagggaacatttagcccagagaagggagggctcaggatagactataaaactgtcttcagacacaggagctcatgtgacagagggagtagacttgtgccatacggccccaggggtctgaactaagaccaataggttatgcaggaaactgaagtgctatgacccaaagagttctgtcagtcagggttcttggctatgagctacagaaacagactctgtgtaaagcaaaaaagaaatttattgaaatgatatttgggggaatcacagaatggactagagaccaggggactggccaggagccaaaagcactctggagggctggtaaccaggaagattggaagccacaggcatggagcagcaacggtctggccaacatcatgagtgactctaactgttcctcatgttgtccactcaggattcaaaagcatgggggaagagtctgattggccgcagttgaatgtcttcccttccttgactaaatgtagggtaggaaaggggaaaatttggctctgttgactctggtatgagagtcaggcaccacctccaagaggaaccaagatgctatgagacaaatgtcctgtgctacctgcaaagatgcttttgaagcccatgaatctgtgaccagtggctcagaattgggaaggacttgtctattcaacagttagctcctttcctacttccctcacatgcgcacacactctgctgaatgattctggtgatgaaaggctgactatctcccaagttcttcctcatgtgaagatgaaatcaaggctgggagtttagacactgcctggcgcttaagtccctcccactttggtctcacttttgtagagttgagtcccgtgattctcttactgaaaactttcctcctgtcaaacttattcaccccatgtcaccaccctctgaccccaccaaaacatcttgtgctcattctctttcctcttatttgtaaaatgttatccattcttcacattccagcttaagtcccacatcatacatgaaacattcctgaaccatcccagttcaaagtaatccctctctggaaatttttgcccttaatcttgattagacagttaatcacactcttttttatatgttttctattttttagaatagatatttcaatcttgttaggacaatttaactgtaaacacatttatatcttctcttgctacctagatttcttacgcatctttgcatctcctgtaaactatttcttatacttctttgcatctcctgtagaacttaatgggactttttgtttgttttgtcttaattgacttgaataccagaagtgggtgtgatcttgatccttttatccaggaatttggggaaggggaaacagaggaagatgaagatagatgtacatcagacaaaccaaaatgactttcctctgagcataatgatgtgaatgacttatatttttacagttttgaggtataattgatgtataataaaccatacatatttaatgtatacaacttgatatgtgtatatataatccatgaaaccattgccctaatcgagataataaatatatccatcacgccctcagtttccttatgccacttcataatctctctacttcattctgaccccaagcagccattgattcattttatgtcactataagtttgtattttctagaattgtatataaatagaaccatttagtatgtactcttttctgtctggcttctttcactaagcataattattttgagattcatccatattgwtgaatatatcaacagttcattccttctattgctgagcagaatttcattgtataggtatatcacaatttgtttttccattcacctgttgatggttatttgagttgtttcagttattgactattacaaacaaagctgctgtgcacatttgtgtacaagtgtttgtgcgggcacatgctttcattcatcttagataaatatctaggagtacaatggctggtcacatggtaggtctgtgtataacattgcaagaaattaccgaaatgatcacacaatgtacattcccataagcagtgcatgtttcagttgctccatcttcccaccagcacttggtgttttgagtctttctaattttagycattctaataggtatgcagtggtatttcattccagttttaatttgtattttcttaataactgatgttgaagatcttttcatgtgcttattggcccatctttgatgaagtgtctgttcatttaaaatgtttaaaaaatgggttgttttctgttttcttttactgggtctcttttcaaccatggctgatgatcacgagggcattctcccatgtagatcaacagaaccatgtccagtcagtcccagcaacagggggtggcatgagcctcacagatggctggactttgagatgacacctgcatgttgactgtcttaccaggaagtgttgcctggcagtgtcatgacacttaggtggggacccagtgaaggttttgggactgaccccctcctcttggttaaagccccgaattaagagactattagagaaataagagttactacctcagctcctcagaagatgatcatgttgctatgaagactgatgaaaataaaacatccaagaagaaatgctaatgaattgaagtgtaatagaagccttacattaggagctgtggaaataccaaaggtgcatgtggccagaacaaaggctagttggtcaagaatgtttctggagaagaaacccaagaccgtagttgacactggccccatgagctgcccctcacacatctcagcagtcgccaagccctgtggttctggtctccaccgctcctctctgcagccaccacaacgccctcctctgcattccagagcaggcacgcttgccccctttgaagccttctgggcctcatctccttctgtcctttcatctccagccttaaaactccatgctgagtgggcctggctcacccagctctccccgcctggccctgaggactgccccccagttgattttgcggggtcctcccgaggacctttgtttagcrcctggccagggaggcccagcccctggagacccctgcccaccgcagcagtctctggtgcctggcctttgttccctttactaaatctaaaatgcttccacatgtgttcttctgattttgcagtcgtggagaaagaacatgaggctgtttaatacctccaatttcattgacatttaacattaagaacacttgtgggcctgttgggggacactttacaatcttgttattaggaaaaactctttcagcaagcagtgatgcaagcagtattttgtctttttaaagtcataagagtttttaaaaaaattctctctttcttaaaaaagatattgtagtagaagaatatctctcaaaaacatcccataatttttttttggcaggatagggtgagatggggctgggaataagagaacatgagatttaggcaatctttcctttaccttttttcttataagtagagcccaagttgaaccacacccccaccgttgatgaaagttagaaaaataatcatgaaattggtggattaaaagaaagaaaatgtttaaagagctctccaaatgtccgccctaagaagttccatacagtattccattgtgcaaggaacacaaccaatagcacktacaagctgacagagttagagaggtacaaattagcctatgtagcacctgggggcttatggagaagaaaaagaagaatcaaagcaaatgggcatggccaagaaggtctgaaaggtgggtgagggtgagtgtagggggatcwggaaataccagcggtttcactgataaaagttacaaacgaaatacatttgaaatgtgacttgcatttgggccattggctgaggaacacagatacatacagggcagcaaggcaaataaatggggttttacaggcccaggtcctaggagtcagttagggaacaatcccaggacttagtgatgcaaaattggggagttggagtatactttaccatgaatggaggctcacttttatctaggagaagatgacaggctgatgagagtgatgactgacagcttaacagatgatttggtgctaccttgggatcactgtctccattaactggaaacagtcacatttcgccactttctgggggcagtatttagagacacaaggttacctaagcagaatgatgatttgtgcttatcttacctcttcccaatgactgttagaactcaccttttagggccaggtgcagtggctcatgcctgcaatcgcaacactttgggaggccgaggcaggcggatcacttgaggtcaggagttcaagaccagcctggccaatacggtgaaaccccgtctccattaaaagtagaaaaattagccgggcatggtggcgggtgcctgtaatcccagctactagggagactctgtctcaaaaaaaaaaaaaaaaaaaaaaaagaaaagaactcaccttttagaatacaggagtatcacactcacaatggattaatccattagcaacagtaaaactgccatcatggcatcatggcacgcagtgcatgcctaagaagaatayggcaagcaaaagttttttctttgaattgtgccaccccagggctctatggctttggataaataatgtaccttgtttttgtatcagattccttatctacagacaaggagatcactcatttattcactttccactgcccacctgtactgttagggtaaaccgggattctggcaggaaagatcagtttaaggctgtttagagccaaactccaatgcacttggatcatgggaactcatgttatgggcaagtcttgccttaaatccttgctgctgagacacctccttgctttgcagaacagcgcattcagggacagaaggggaaaaaggagccagacacagggaccaaggagacaaaggaaaaccccaagagtacaggatcatggatggccaagaagagaccctcaggactgcagagaggtccctgacgatgatgccagggaaactacttggtggacaaatggaaggccagtggtgacagtgtgagggaacacagagtgcaaaggctggaagatgcagtgggtctggggatatgtggctgtgagaagaagaaaagaatgacaacttgagagggtaacagggttatgacgaggtttttcttccccctagctagaagagacctatatatgcttcatggcagcaggaagaagtctgtgcaaggggagaatttggccacttaagggagggcattatatgggtgcaaggagtgggagactgccatcacccagggaagaggacagagtaggactacaataaaagttggttgatcgacagatagttgctcagtttgcgctggctggtaaacataatgctgtatggtattggggttaagcgtgcaggctctgagttctgcataatttggggcaagttgctgagatgtttatgaagtctccttttccctatatgtaaaatgggggcagttataatacatatctttgtggtaagaactgagagttaatacatgcaaataatttaaaataggttctggttcatagttaatgctcaaaatgttagactcagtaataaaaataatggccatctttgaggattaacgattgaaagctcaaggtcaagtctcattatacagcaacataaaagaagaaggtaaaggtgattaaactgacccagggcatatcttgaggttccttttttacaaatagggctggatttcaacttctgttcttattcttctttcctattccccctcaaaaaaacttacttgaaaattaatcaaacttctggttaatcaaatcttaaacacataccataataaatgttttggagaatctaagagagtcatttttaaattaatatatcaaatgctgcagtaatatatttctattatgctgactatacatagtataaagttaaaaattgttttggtgaatttaagtttgtagttatagtaggaagacactaaatttgcaacagcattcctcgtgatttaaaaaaaatcttttttttttaaatgaagccacaagcattctgcttctgtgcttttttattttttatttagttttttgagatgtagttttgctcttgttacccaggctgcagtgcaatggcacgatcttggctcactgcaacctctgcctcccaggttcaagcgattcttctgtctcagcctcccaagtagctgggattacaggcacgtgccatcatgcccggctaattttgtatttttagtaaagacggggtttctccatgttggtcaggctggtctcaaactcccgacctcaggtgatccgcccgccttggcctcccaaagtgctgggatcataggcgtgagccaccgtacccggccgcttctgtgcttgttaaaaaaaggttgaagggggaaaatcacagtagctgccctctctctgcttttaagaaatggaatgagtctgtgggtggctaccagactgggagggcttggggatgctgactctgtggtgaggtattacgcagtcaggttaatttccttataccacttgtcaagttagaaggagtagagaagatgccaggtcttcactcatccctgggcattaagggaaaactaaagagcttccaagaggaaatgctctgagttgaagtcagctcattgcgccgcctcagtgtttgacttggcatattactacggggtctttattttctcattactaaactgggtcatgtaattgacaagacaggggacagtcggggtgggaccattctagaaaatctgtaactgacttttttttttttaatggagtctcgctctgtcgtccaggctggagtgcagtggcgcgatttcggctcactgcaacctccgcctcctgggttcaagcgattcttctgcctcagcctcccgagtagccgggactacaggcaagtgccaccgcacccagctgatttttgtatttttattagagacaggatttcacgatgttgcccaggctggtctcaaactcctgaccttaggtgatccacccgcctcagcctcccaaagtattgggattacgggcgtgggccactgcacccagcctgtaactcacttctgaaggtccagaaattccttgtttccttctgttatttatagtacgctacttatttaaaccaaacatgaagttaattgacacttagccaggcaatttggattacctgtgtggcttcacacaggtatgggttgtagacaagtctaaaaatagaaaatgttaaaatccagctatctcagaaaaacttgggttcatctccatctcctacctcccatatgtcacaaatagacgcatgggatgtgaaatggtaacctctgggtaaggtgacaaaggtactctaatcttggcttacgtggactacacggttaatccactgaataacaatcagcatcttcatctgtgtggtaggagaaccggaggtcagaagggtagaggggcggctaaaagtactttgtttctattactgtatgaccttggactagttacaaaactttttgtgcctacatttcctaatccctaatatggggttaacagtgcttgcctctgtttaaaaaaattactcagtgatgcttactaaagcatggtaagaaagactttattcaggaccaacgcgatgggtacagggatcagggaaacccggggagagagagtgggctccaattctgaatgcagcgtcggcaagtagaaatttatggccatgtaaaatcactaagagtaaccatcgggggaagagggattctggctcaaccgatctaaaggattcttgtagaactcaggccagggtgaaaagacatgactgggggatagaggaagatgaggaacctgatctgctatgaggggatgggggttctgtgctagaactggattttacaaggaagtgcacagatgggcctagcatgagattcagaagcctgactaaagtttggccaagcaaagaatctttgtcacctcagggctgttgtgagaattttaggagacacatccaccagccttggcatggggcctgatgcagagtaagtgttcactaaactttacctattaacgttaaagcactttaagttgacaaacactccacgtacagagcttttaatggggcaaacaaggggcagaggcctcagctgcagggtactcaacctctaaggaagggcgctggagaaaactgcacttgcagagcccctggctggagggcggagaaccatgtgggtgtaaagggatggcaagggcagaacgtatgcccctgcccaccttagacagttgctaaagggtctcccaggcactcagcctagcctttaagtgaaagcggaggaaacatttaaagaaatgagatagagttaaggtgttcgcctgccctccgctgaaacacgtgggggcaggtcaggggcacaccacaaatgcccgtatcgcgcctgtgtgtaccaggcaccgtcctcggaggttaacgtgcagtaactcactcgggtccccactttcggcacaggcagcaggcccaaggtcacgcagtgccaagggactgagtcagacccgagcccgcgcgccgcggcccacggcctgtgccagcgcgctcctcgccgggtagggggcctggtcagccgcgtcagacctgagagttgtggctgggggcgagagctgcacccccctaccgaccccgggcgggaatgttccagaacccctgcgagcagccgttggccgcacagcccccgggccggccgcgaccccgccttgcgccgcgaaggtccctagctccggggagtcgcgggcgaggggcacgcgcacggacgagaccgcaccgcagcgcacgcgcactggcgggcactcactcgcccgccgcccgggaggagaaggaaggcatggaaagttccagccggttcgagagctaggtagcaggcatggcaggaggcggggtaggggcaggcagggtcgcgagggggcgtgcggccgccgcgagccgctctgggccgcgtctgcagcaccgcccctagccgcggccggcgggctgggctggggtcggggcgggggcggtgcggcgggtgcggggctgcggagggggcgtggcggccgcccgcgggcggagagggggcggggcggcggcaaggcgcgcgggcggggcggggcgcgccgagggggcgtggcgcggcgtctgcgcagctgccagcgcctttaagcccgggctcgcgctctcggaccgtgctttcgccgcctgggagccgtccggcgcagcagtttctaggtccccactgtccccgccgtcccgccccttcgcgtcccgggaaccggctggcttccgagccgcactcgccgatcctccaggcatgccccgctacgagctggctttaatcctgaaagccatgcagcgggtaagtgaccttccctcagagccggtcttcccgcgcgggcgcccccgctgccgctaggccgccgtcccccgcgcgccctggccgcgggaccccgggccttcctgcactcctcggaggaggccggggcggcgggcgggcggcgggcgtccgcgggaagggggcgcgcgtgggccggccgggcccggccgcgtgcgcgcgggaggcgggggtgtgcctgcgcgtgtgcgcggtccgggagggtgtgcctcgcaagcggcccgccgggcggggggcggggcggaccgagcgggccccgaccccgatcccggcgccggcccgcgggagtccagtggaaggtccgcgggaggacacgcgcgggcgcccagcccgactccggcccgtccccgccagtcgtgaagctgcctcgtcgccggccccgccgccgccgcctggtccgtcccgctccgccgcccgccggctgccgccgaccgcctccgctctagcgcccgccggccgcccggaacgtccgcgcccaataaagcgttcctccaaagcttgtttgtgccgttgtctgtattccagtctcttgcaatcgctctcatgttaaaaaaaaatcttttgacttttctttttctgacttcagcgaaaatcccgctccgggtgcccttagcccagtttcattcatccaagttgtggcctttcttgcgcctccagaagacactttcttccccctgcttttgattgatcttgaggtaggggatttcaggtttggagggatgctaagcgaaccagcggcccctttcaggtgacggcgtggccaaggacaggggcccgcggcccggaggcagctcacttcgtcctctgtcctgggtcatgtactcctcaagtcgtcgccgaaatccccattctcccgtgaattcggaattcggtaacgtagtttggtgttatgtttttttttctccaccaggtgtaataaaacaaaaatcattgtaccacgtccgaactttgtaagcacagcttcctacagcgctagaggagtggacgcatttttacgtttgaaattaggctccaggtcaattgcgaggagtattaccaagtttggttgaacttaagctcaattgataaactaacaatcacggagcgtcgggagattgttaggaagtgtgctttgcatattgttaactgggaagggacgccagtgcctctctatgaggtccagacagcctggccaggcatgccattgtgtcccccagcttgttcttcatggatttggaagaagttaagatagtatctgttcagcctcttgaatatcccttttggccctcctccttgcttaccagcatatgtaactccgaaaggataggagcagtgaaaacaaagcattattaaaagggaagatttttaattaggtggaagttgtttaagccctcccttcaacttacgtgttttagggaatgtggaacctgggaaattcgttactgaaattccttttgtttactttccttgtcttggggaggtagcaggtgacactgaaagaggcaacctgtaggcaataatatttgctcattctgtaaccctttgaaacctttgaaatgaagacttgccctcccctttgtttttgccatagttgccaagtatcttggttaacatggctgcaagtattaagtgtatttcttttaccattr

SEQ ID NO: 96748 - DNA, 12809 bp, Homo sapiens
agcaataaatgtctggaacactatatatgtaaaatagcagtaagcaacctatttggtagatgtatagatagcaacaagcaacacacactcctgatccaatacaatgattcccaattctcactgtgggacatctccaaagtgtctccaaaagctttagaaacattgtgaatgaactgatataatctgacaataaaactaactttgtttagtttgaaaaatataaacataggacatactattccttatgaagggaattaaaaagaagtcaaagaaaaatatctgagaaaattgtactcataaatgaatcttttatttaagtaaataaatcttttttttttttttttttttttttgaggcagagtctcaatctgtcacccaggctggagtgcggttgtgcaatcttggctcattgcaacctctgcctcccgggttcaagcaattctcctgcctcagcctcctgagtagctgggattacaggcacgtgccaccacacccaggtaattgtttgtatttttagtagagatggggttgcaccatgttggccaggctgatctcaaactcctgacctcaagtgatctgcccacctcgggctcccaaattgctgggattacaggtgtgagccaccatgcccagcctagtaaatcaatcttttatttcaatttatttatttcaataaaagattgatttatgttttattgatcacaaatcaaattaaagtctaattttaaatcttttatttgaaaagggagcgttatcaatctaaaactgatttctgccctgaaaaggtccagaaacaggcaaaacctctactgtaattttcaaagtctgaaggcctcaaagggtggtctgcctgcaacaccccacctgttgcctagaagccgaatcagaatctgcattgtaacaagatctccaggtgagtcatgcgtccattgaagttgaagaagtactggcagagagcagcagttcccaaacttgtctgcacatgagaatcatctgggaatctttttaaaattccgaaatccaggccataccctagaccaacgaaatcatgggacacaggcgttgatggttttgaaggctaccaggtgattccaatgtgcagccaacttcgagacctagtggtcaccctagatagggcactgggaaatcacttggggagcataaacactaatattggtttccacccccggagagtctcatgtcgctggtctcaggtatgacctatgcatctggagtttttaaaagctccaggtaattctcatgtacagcacagtttgtacagccacagacctggagccaggcacagaagatttcaaaatggcagctgagcctgcaccactccttggcgaagaagggtttaaagtcagtgaaccttaattaaaatgaacagttggcctcacagttttcagctaactcaccaggtagaatgacagcatcaagcttgctcgagttcaggtctgccaagtcttggacgtccctccgggctctcctggcactttcctccagcacatttctcttctttctgttgggctccctttcaagtgattaacgatgagcatctgctcgacattaggcgcaaataccttcaccttcaaaaatagaaagaaaaacacatgatgtcattacctctatgaaaacaatcaagcaacactatctcagaatctaaaccaggaagccaagaccaaaagccgcgaagtgattctgtatgccttcagggccaacatcagctagaaatattatagctcaaccacaaagaagaaagtgcaggggccttctaaaagggggaaaaaaagagctgtaaattagcttccaaaaggaagggagatcaagtagattacagagaggtggcttttcagataaatatatatatatatttctttaaatagatgaaagagaggatgtaattttatagataggaacatacaggactcaaaaaattggaggattaaatcagcccttgagatccttcaaagcagtgcttctcaagctagctacacattagaatcacctggagagcttgggcaccaacgaggccaattcagtggaaatctctgggagtgaagagccagcctgagccttgctccagcttaaaatctccccaggcgattctgtttgtcagggctggcaaccactaatctaaagcaaatgggagataaaactcagggctcagagttaaaaccccggagtcttcaatgccaagaccccgcagcagggcatttggtagctctcgcttgatccacctccatgcctccagccccaccaagctctgggtcacccccggttcatcctcagaaacactcgagaggggaggacatcactctagtttccctgtctccaaccctgggatcctgtaggggccctgatctggggaaacatgaggacgtggaggcaagggaggaagctcaggggagacacttgtatattgggggttgcctttgagccacaccttcttcactggcttctattccaacctaaaacacacaggtcagcttcaccaggaggtacacgaggctggtctgaatcaaatgtcccttgactctctgaaaggatggcattagggctgggaggcataaaaatcaagagtctcagcctcttgttactaaactttgtatttcactaaagtatatgctaagattctaaacattctctcttcgtatgttgttttataaaattgaataatagctcctatctgatataccatatatacatacatatatgagcttagaatctcatatatatatatatatatatatatatatatatatatatgagaaaagactttgaatattctgaagggcaagaaagatgcagatgcagatacaggctgggcatggtggctcatacctgtaatagcagcagtttggaaggccaaggtgggagaattgcttgaggccaggaatttgagacgagcctgggcaacatagtgagacccctgtctctacaaaaattaaaactaaaaaattagccaggaatggaggtgtgtgctgcagtcctacctactcaggaggcagaggtgagagaattgcctgagcccaagagtttgaagttacaatgagctttgatcatgccactgcactccagtttgggtgacagagcaagaccccgtttaaaaaaaaaatgctaaaaacatggatttgattttaaagaattccccaaacaagttggccttcagttgtttcacggaataatcagatgaacatgctcaaggagtgaaacacgttttcaacatgtgcacgtcctttggaactgataagaaagcactgaggcatttactgggttgtaatctagactcaataagtccatgtacctctcccggacttcatctcaagcacagagacctgagttcattaaatactcacaaaccccagtgtgtaggacatcgcccttcacccattaggaaatcagtaactacttgttgaaaggatgaatgaataacacccacattaatcttaatacccttcaagtgaaagaggtgctagatatttcctttcctaagttttagagaaaagagaattggcttctaggactgactttgtcactgcctagtgatgaccttaaagaagtcatttttcctcccagggaaactcagccaggagattgaacagagatgtcctccagcttcaaacttcaaatcctgcagacaaagaaattaatgaattgtatattttaacttattaaaaagaaaggtgcagcagctgtggcggttcctcacaaagttaaagagaactaccatgattccacttctaggtatatacacaaaagaattaaaagtagggactcaaacaggtatttgtacacccatgttcatagcagcattattcactacagccaacaacccaaatgtccatcaacagatgaatggtacacaaaatgtggtgttctacatacaagggaatattattccttccttaaaaaggaaggaaattttgacaagtgctaccacatggatgaaccctaaggacataggccaagtgaaataaggcagtaacacaaagacaaatattatatgattccacttgtagtaagtacctagagtagacaaagtcttagagatagaaagtagaatgtaatagaggctacctggagctgggagaaaggagaatgaggaattagtgtttcacggttgcggttgcagtttgggatgatgaatatggtctggggacggacagtggagatggctccacagcattgtgaatgcacttaatgccagtcgatcacacactacttaaaaatggttaaaatggtaaagttcatgttacatatgttttactccctccccctcccctccaaaaaacaaaacactattggcaaaggggtagcaggtgaggggcaggctggtctggtccttgtgactgcgaacatccctgctgcccgttttttgtctgaagcccggctgggtcgctggagatccagcggagtgtgcggagggaggcgtgttggataccttttaaaaatgagaagccccaggccgggcgcggtgactcacgactgtaagtcgcggcccaaccctttgggaggccgaggcaggtggatcacttgaggtcaggagttcgagacaagcctggccaaaatggtgaactcctgtttaaaaaaaaaaaaaaaaaaaaaaattagcagggcgtggtggcaggagcctgtaatcccagctactcgggaggctgagacagaagaatcgcttgaacccgggaggcggaggttgcagtgagcccagatcgtgccaatgcactccagcctgggcgacaagagcgagactccgtctcaacaacaacaacaaaaaaaaattagaagcccctggggacggagagcattaggacaaatacctaatgcatatggggcttaaaacctagatgatgggttgataggtgcagcaaaccaccagggcacatgcatacatatgtaacaaacctgcacgttctgcacatgtatcttggaacttaaagtaacaaaataaaataaaataaaataaaaataaaaattagaagcccgagagagggaaaacagcttaggaaggggttgcccccgccactccgcaggctgcagagggaagagaaagcgcccccgtggcgcccccagggccgtgcagcccagacctagccccgcagccccacataccccagcacctccgaagctgcgtgcagagccgctcgctcccacctccggctgcacccgcgcgcccccttgcggcggattccgctctggcgcatagccccactggagcgctggcgcgttggcgatggggtcccaggtgggagagagatctgtccgctgaacctgcgcatcccggcccctgcggaggctgcagagattctgccctttctgttcggagggaagagagagggcgccagggagacataagctagatttttattaatagataactttatttgaaaattatctttaaacgaaagagcaaggggaaaaatggattctatcctttgccgcactactaaaaagtaacttccattcaacttatttcaaaagagaacgtcgatattgatatgcaatacttttaattgttttaaaatatttaattgtgtgcaataatttttttaactgctcagttccaaagctggaagttgaagtgatgtttttgacagggaagactgaagaagagaccccattgcatcttcatcggagctggaggacaaaaaaaaaattcttaggacacttaacatggagagtttgagatccggatacagcgtgggctgtaactaagggcagtggaagcaggcagccttggctaggatgccgctgctcctcatgacattttgtctcacaaacttagcaagttcttagaaagtccaaaacgccatatgtgttgcctaattttcttatatgatcacaggaaataaataggaaaaatgcagataatttgcattttatttgataatttttaaataaaagttacttgttaataaaatttcaggtaggatgctccctgagtttcttctgtacaatatcattcattgaccagatatttgaagaaaagttattctttgtttttttgagagcaggtactgtttattaactgaccagcttagaaaaataatcatggtagacaccttagttcattattctaataagctgttgatctggtcctccctgttgccagcatctccaccttctacmaaatgggtggtctttttcttctttccacctcatggagaagataatttgaaggaccacaggaagttatttgcttcttcgaagcattttccaacagtatagatctcatgaatcagatcttccgtgcagatgatgccatatttaccaagcgttcgagcaatcaaagcgttatctgtcaaagcaattcgcttcttattgattttgccataaccccgcttgtagattagtttatttactgacttcagatttgggtaccccctgcaatatatggttctacaatccccagcatgttaattgaaaccttgttaagcttcacaaagtttccactgaagatttgacgaaggcgaagaagctgcaacacctttcggacctttgggctcacaccactgatacctctgatcctgatgacaaatgccaatttgggttctgcaggtacatagaagttgccggctttgcttgccatccttgccattcaaatttaagttccgtatatctgtctatattccttgtgatagtgcttcgctttttcatagataagcttcctccttgcctttcgaagcatcttttgggcaaacttctttctcaggcatttgatcttcagctctgtgaaatttcttcgctttttcttaagggtttctggtacagcaggaaactttttcttcttctctttgacactytccatggttccagcgggaaaagaggaactattcctttattattaaaagatgaaatctgcaatatccagcaaacattactttccctactggatctttaaattattagtcccatgttcctctgataaaaattcactaagcctttatgtcctgggtgctgaataaaccctgcatttactttcaagaagaaacctacctttcttaacctggaggtagattgctgctcataagtgacagatggagtactgtaaatccccgagggtgattctagctcttgacccagtaggatatttactgtcaacgatgcctagatttagaaagaggatgtaaacgtggtgtgacaccagacagggcaaagagcaactgcttgtggaaaacacacatgcatccgtcatcactgcagatgaggaggaaaaggaggacaaggagtgaatttgaaaagcaggataacttagtgtaggtctgagtgcccaagatcaaacctgactccaccctcactgccttatgtgatcccgagaaattactcaaaatatctgtaccaacgtttcctcaggctgaaagtaggaagtagcacctttttcatagagttgttggaaagattaaaaatagtaaatgtcatctctgtcaaaaccttgatactagtgtatttctgttcactgaatggtttgtacccctttagtttccttgatatacgttgattaaaaaaaaaaaaaaatttgactgggcccggtggctcacgcctgtaatcccagcactttgggaggtagaggcaggcagatcacctgaggccaggagtttcagaccagcctggctaatgtggcgaaaccccgtctctactaaaactacaaaaattatgtgggcctggtggcacatgcctgtaatcccagctactcgggaagctgaggcagggaggcagaggttgcagtgagccgagattgcatcactacactccagcctggcctacagagcaagactctgtctcaaaaaaagaaaaaaaaaatcaacaaaattgattaaaatgtctaattggcttttattagtgactcataaaacaggcagttgctaatcaaaatagagggagcttcaatgagcctggcagaccagttggttttcctaaggtagcttgaacagaaatagggaaacaggaatacaaaaagtgaattggttaacatcagtttacttcaggttactttacttataaagggttaaagcagagaggacttccttaacatgctgacttaggctgactgggccctttctgattgcttgctgtgaatctcttgtttttacgaaaagccagtctattttgggaattttcccgtttacgtttcagtttgattacagttcgattacttagcacgagcgaccccattttggttcaatctgttgcgacctaatgcaggggctcagttcaaaaccatggcctctcatacattttatttaacaacacaaagaaaagagtttttgttctgaagccaattttcttgcggctattgataaatcgatcataacagaactaaaaaatatattcaataaacaagtacaagattaaagaattgtctaaacaatgtaatgtaataagcaaaataaatccaaatcacttgatttaggattagggtaaggtgttccttatggctccacagtttgtttttaagtattacctattaagtagatgtctcactctaatctctgccttcagtgaatattataaattttaattttattaaattcacacttaaatgatgcttttaaaattatctttgggtcgggcacagtggctcacgactataattccaacactgtgggaggctgaggcaagaggattacttgagcccaggagcatgggcaacaaagtgagactctgactctaccaaaaacattttatttaattagccaggcatggtagcacaggcctgtagtcccagctactcaggaagtgaggtgggaggatcgcttgagcctgagaggtcaaggctgcagtgagtcatgatcatgccactgcactctaacctggacaacagagcgagaccctgtctcaaaataaaaatgaaaataaaattatctttgaactaaaataaatgatgctttaggcaagtgaaattgtcgaaactctgaaaataggatgtacgtatagttgatgtatttgtttagcccagtttatcatgtaaacaacaggttagtatacccaagtttcagaaacactttgggggttcattaatttttggttacctttaagattttcttaacctcttacatgaatatttgtgtcagggccaggctctgtggctcatgcctttaattccagcactttgggaggccaaagcaggaggatcgcttgagcccaggaattcgagaccagcttgggaacgtagtgagactccttatcactacaaaaaatttaaaattatttgggcatgttggtacattcctgtagtccagctactataggggctgagagatgggaggatcacttgagctaggaggctatggctgcagtgactgtgattgcactactgcactccagcctgggtggcaaagtgagaccctgtctcaaaaagaaaaaaaggagtaggaaattagtgtgtctagggccggagctcttaggcaaactggtgaagccccttctcagaataatgcttttaacgcctaaaataaaaaatgagattgtaaatgagaaactaaaaattagcttggactttaatctgccctcgtattcattagcctggactgataaaaccagcctcaaaattaccagaaaacagtacttctctcaaaccacagtaaatcataaagtgtcataacaacctcctttcttttctacttaattttttttttttttgccaagtcctttatggaagttgttgtgcgtgtctctgttgtctttgtggaaggccagagccacacggtcctaagagctgggaaccaggaagcataggctgatctgaagaagacacttcaatcatgggtgatattaaaaattttctgtatgcctggtgaggcaaaaggaagatgactccatcctatgaaattagagcattggggaacaaaagtaggcagaaattcttgtgtgaggttcaggtggaagggtataattacagtggcataggaaattccaccaataaaaaagatgcacagagcaatgctgccagagactttgttaactatttggttcaaataaatgaagagtgaagaagttccagctttttggggttgcatctctgcccccacttactgatattcctgacactacagcaaatgctgaaggaggtttaccaacaaccatgggaggtcctcttccgccacatctggctctcaaagctgaaaataattctgaggtaggggcctctggctatggtgttcctgggaccaaggagccaacttgaaggattactactcaagaaaggaagaacaagaagtgcaagcgactctagagtcagaagaagtggatttaaatgctgggcttcatggaaactggaccttggaaaatgctaaaactcatctaaaccaatattttcagaaagaaaaaatccaaggagaatataagtacacccaagtgggtcctgatcacaacaggagctttactgcagaaataaccatttacatcaagcagctgggcagaaggatttctgcacatgaacatggatcaaataagaaattggcagcacagtcctgtgccctgtcactagtcagacaactctaccatcttggagtggttgaagcttacttcagacttacaaagaaggaaggagagagagtggaaccttacaaagtaaacctctctcaagatttagagcatcagccacaaaacatcatttgagagctaaattttgagattatgcccccgcctgaagatccttctatgccagttgcactcaacattggcaaattggctcactttgaaccatctcagtgacaaaaccaagtgggtatagttcctcggtcacctccacaatccagatggaatccttggactactagcgacattgctgagggacctctggcttttgcttctccagagcaaataagcttggacctcaagaatgaattggtgtaccagttggaacaggatcatgatttgccagcaatcttgcaggagcgagagttactgcctgtgaagaaatttgaaagtgagattctggaagcaatcagtcaaaattcagttgtcattattagaggggctgctggatgtggtaaaaccacgcaggttccccagttcattctagatgactttatccagaatgactgacagcagagtgtaacattgtagtaactcagcccagaagaatcagtgtagtttccatggcagagtgagttgcatttgagagaggagaagagtctgtaaaaagctgtggttacagtgttcaatttgagtctgtacttccttgtcctcatgccagtataatgctttgtactgtaggtgtgctcctaagaaaattagaagcaggcatttgaggaatcagtcatgtaattgtagatgaaatacatggaagagacattaatactgacttccttttggtagtactgcgtgaagttgtttcagcttaccctgaagttctcattgttcttatgtccacttctattgataccagcatgttgtgtgaatatttcttcaattgccccatcatttaagtgtatgggaggacttacccagttcaagaatattttctggaagactgcattcagatgacccactttgttccttcaccgaaaaccaagaagaaggacaaggatgatgatggtggtgaggatgatgatgcaaattgcaacttgatctgtggtgatgaatatggtccagaaacaaggatgagcatgtctcaattgaatgaaaaagaaactccttttgaactcgtcgaagctctctttaagtacattgaaacccttaatattcccagagctgtgttggtatttttgcctggctggaatttgatttatactatgcagaagcatttggaaatgaatccacattttggaagccatcagtatcagattctacctctgcattctcagattccttgacaggaacagcgcaaagtgtttgatccagtaccagttggagtaaccaaggttattttgtccacaaatattgctgaaacaagcattatcataaatgatgtttatgtcgttgactcctgcaagcagaaagtgaaactctttgctactcacaacaatatgaccaactatgctacagtatggggatcaaaaacaaaccttgaacagtggaaagggcaacctggccgaatacggcctggattctgctttcacctctgcagccgagctcgttttgagagacttgaaacccacatgacaccagagatgttccaaacaccattgcatgaagttgctcttagcataaaacttccatgtctagttggaattggccagtttctggccaaagcaattgaaactctccctttggatgctgtgattgaagcagaacacactcttagagagcttgatgcattagatgccaatgatgatttgactccattgggacgaatcctggctaacctcctcattgagcctcgttttggcaaaatgatgataatggtgtgtattttctatgtgggagatgctatctgtaccattcctgctgctacctgctttccagagccttttataaatgaaggaaagtggctgggctacaaccattgaaattttgctggaaacggattttctcatcatgtagcccttttatcagtattccaagccggagatgatactagaatgggtggagaagaagcagaaatacgtttttgtgcgcacaaaagacttcatatggctacactaagaatgacttgggaagtcaaagttcagctcaaagagattctgattaattctgggtttccagaagattgtttggtgacacaagtgtttactaacactggaccagataataatttggatgttgttatctctcttcctggcctttggtgtgtaccccaatgtatgctatcataaggaaaagacaaagattctcaccactgaagggtgtaatgcacttatccacaa

SEQ ID NO: 96749 - DNA, 13717 bp, Homo sapiens
atctcaggtgcacgcctcaaagcccagctaatttttttatttttaatagacatggggtttcaccatgttggccaggctggtctggaactcctggcctcaagtgatctgcctgccttggcctcccaaagtgctgggattacaggcatgagccaccgttaccggcctccacaggcactgaataaaaattatgtttccaaataggagttcattgaccttagggaaaatttttcataaaaataactgtagaatgaattttttgcaaatttatttttaaaaacggtaccccaagccaatgattttgtggttccgttttcaatatcctcgttaaatttccctactgataacagactctctctgtgaagatttttaaattacaatgaaaattagaatacataaaaatcctttaatatccataagcatttgctttggtatgttcatgatcaaattaaaaattaactttgagacctcacaggtcgacagcacaagcttcattaacaagagtaacacaccatcctaatgtccacacagcacagaggtaacttctcattattaaaaagaaccatggacgcatggttctgaaccctgcctgcacttggcgggaacctgcgacacgaaagcctggccagcccttggagccatgcagggtgcggttaagccgcgaacaccatgtcccacttgcctgcctcggggcttctgccttccagaccgcagcaggaggcagaggggcaggaaaggctgaccggtgtcaccttccacccaccctctgagtgggcctaagtgggaaagcagcagggctcactgcagcgcaggctggttggccagcacatgcgcacgctcccccgaacggcagggaagaaaaattgaaactctccttttaagttccctaagtaggaactcgcgactgcgcgtcagctttttcccacgctcccgccgagccgcgggttccctgcacccgcctctgccagtcgaactccctgggagcccaggctcgcagcctcccgcgcagccgccgggaatccgtcccgcagcaccgcggtccagcgcccccgggccccgccccacccctccccgcaccgcccgcgccccagcccccgccccgcctcaccgtctcaccatccccgccttccccgccttccccgccttccccgccttccccgccttccccgccttccccgccttccccgccttccccgccttcccgggatcgcccggcgcgttccagcgcccccgcgccctctccacctcccgctttccacgcggccctcaggcccgcctcctccgccctaccttggtccggatctgccccgaggtagacactttgcggatcagtttctggggtccctcttgctccgcttcgctgtcagacgaatcctctcccggccccgccgaggcagcggcggaggtgaccgcggcgccggctccggcggccgctcctccagcggcgcccggagggtggtgctggcctccggcccctgccatcctctccgactcctgcggggacacagcaccgcccggcgggggcggcggcgttggtcagcgggtgggctctgcccgagcggagcccggaaccccgtgcccggccgccgccgccatcttccgtttccctagctacccccgcgaggtaagggtcgcccgggacaggcgccctccaggcaggggtccacccggctcctccgctcggttcccgccggagcggcggccacggtgggacgcagaggtaacggacccccgcccgcctcggacccctgcgcacccagcctcggataggaccagcgcgggtagagaggatggggtgacagggtttggagcaacatctcttccactccctaccggttggggtccctaggatggacaggagggtgggggaggcaggaaacctctgcagcccaccccgtagtggcgatgcccgcacaccccctctcacttctggacagcaggggcaacgccgatccctggggaagaatgggaacctggagcttcctcccagcacccttgggtgcacccgccacctcctgaaccccgaatctctccagagacacttgggcctcgccgcgcggttccagctgaataaaagtcccctctgccaccaagacagtcgggggctgcccctcgtcggtttccccacccccagccccactccgaggaccgtacctctcccgcctccgccagggccgtcgggtcccctcagctctcctgacggcggcgttcagtttctggcccacccccacccccatccggcgcacacggaagagaagagcattttccgggaggttcagctccgctctgagaacttttcgttcagaaagagcgatccccttcggctaacaggaaactgggaagggcgtggagaaagcgcagaaacaagagactacacgcagcccaagacgacagaacgcacaagaagtgtctaagctgaagcgctaaccgagattgcctggaagaaaacaatacactcgagccatgcgaacaccagtacccgagacaaaaagccttggaagtcctggcagagccactccctagcccggactagagcaggaggaagtgggatcaacaggctgtagccaccgcgcacaactcccctgcaagctggctgcgcgggcacttgggaaccgcggactggcagcgggttgtgcacgctcaacgtcaaagaagcctcacaggtgtgagggggctgcggtgagggggctgcgagagaagacattaaaacgacagatccctcttgtcatccaaagagaacaccaaactggtgttagctatatttttaaataggacaaaaagtccctgccagactgtggagtctctccacctggagaaagcattcaatctctgttatgttcatgcctttcagtaccattcctttcgtattttttcagttgacatgacctttaaggttcctccaaactaaggttctaatttttttttttaacttgcagtcttactcccaacaagaaatttgatatattagagctaacagttctaagaagttttaagaaatagtatgcaatcccaatactggacatcacactgtaaattaaattcattaaaatgtaaaatgtgtttagttcaaatatttaaagacaggagactgctgctatgtaataataacagagaggctatttctgcagcttctgttgtctcctttaggaaaggaaggagttgggcaaaatgaattttaagaacgcttagaactctacaaatatgtaattctttatctacaaagaacatatttctggaaattcttaaaagagaaaaataatcaaaataatggccttcattcccacctgtttggtcatggacaagtccaatattttggaaatgtagacaaggacacctagtaaagggtcttttgaaagaataaacttagtttagtcttctcctttaatgtaaagaaactaaggccccaactgacaaactgagaccaaagtcaaaatcatgcggttagtattctaatgttctattcactttatcacactgtataacaaaagtctgtcagttaccatatacttctattcatacattatgtgttttatatagcaacattttccagaatccaggcagcgagtgattaaactgaaaggcattatctaatgcccagcctgattttgtgattttaacaggtcagattacgcatctcactctttgatttgaacactgattgcttaaagatacttaaaaagtttcatatcccagagctgagccatttaatacctcaaagtaaaggtattcctttctcataaagatttaacctcagagccagctttgcacttctgcaatcacctcttctgaagagccagtttcaacgaatccattatttaagatacctgacttactagcctcttctcggtcttatctgtaaattagaagtttttagaatgaatatctaatttgtgcactgtgtacctgcaatgtacttcaccttcctcaagagtattacaaggtcaaggtctcaatctttccaaccatttcaaccatgtagctcaaaatagcaactgaaacaatttcaaatatgtggtatcttacattatttatttgatttataagaattccttgatcttttccttacttagtgatttcagatttttcagtaattgcttagatgcatcttacatttttattgttactttgaaatctctgttcagaacatgtgacaaacacactattaaagacttcaacataagctgtgtagacactgcatttagggtgaaatggaaataggtggtagctacccctaaattaggtttttacttaatagagatcctggcccattaaaacaaagaacacctattagactgaagatgtgtaagtcacagccaaatttcatgtcaactttatgaatattcgtgtattattttctacagaggtattttgaattgtatttttactgatcactactcataacaaaaggggttttatacccattggcaactttcaaatctcacatattctatggctttatcttaaatattacgccataaatacgcagaatgttacattttatatcctgaagagttcaaagtgttctaggacttgtgttcctaatcaataaggaaccatgcaaagaatactgcaggttgaccaagtacaggcattgagaagctgccttaattaaaacttaagaacacgctatttgctacatattaagaatttaacattcgaaacttttaacctattaccatttccttagttgttacctgaatgaaaaagatttggggattaactgtgatattaactgcatatacatatggtcatcctcgtatctgaggcaaaaacctttcatcatctagacctaatgcaaagatgtttataacctctcatttacattttggccctatcctttgaaactctttccttcctaattttcctttcgacctggatagttttatcagcgctaactagtataaaaccatttcaaaataaagcaaattttttttctttttttagagacaaagtcttgctcttttgcccaggctggagtgcaatggccaatcacagctcactgcgtccttaaactctgggctcaaaggctcctctggcatcagcctcccagggtagtcacaggatacctgggactacagacatgcatcaccagtcctagctagttttgttgtggttgttgttatttagacatcatctccccctggtcatcttccccaggatggtctcaaactcctggcctcaagagatcctcccacttcggcctcccaaagtgttgggattacaggcatgagccacagcaccaaaagcaaattttaataagtgtactctagcatcccccaactaaggactactttgtaaatacttccacatttttgaagtgttggctagaattctaactacctattttccccccagtaaggcttgtttggctaaatatctttctacccatccatgcccaccactaaagtattttttaattgattagaaatttagtttatgcctctatttccactgaaatttgattgcatttcaaagctagcattaaagaaaatacacagaaacttagaatgctaaaatttatcttctttaggcccaatgacttccccagaatgctaaggctgatcgtttatttaaatggttcgcttaactaacttcagttcatctcccaatcgtgtcgtaaagttcagcaacagctcaacatggctgcgttttaagaaagaagtgctggggcgggcgcagtggctcactcctgtaatcccaaaactttgggaggccaaggcgaacggatcacgaggtcaggagatcgagaccatcctggctaacaaggtgaaaccccgtgtctactaaaaatacaaagaattagccaggcatggtggcacgcgcctgtaatcccagctacttgggaggctgaggcaggagaatccaggaggcggaggttgcagtgagccaagatggcgccactgcactccagcctgggcaacagagtgagtctgtctcaaaaaaaaaagaagaagaaaaagaaaaaaaagaaagaagtgctgttctctttactgtttgtcagcatcaattcctgatactgtgtttactcttctgcctgaatagttccacgcagaatcacaccatcatgttttaggttccatcaaaaatgaatgaggagaggccaggtgcagtggctcatgccagtaatcccagcacgttaggaggctgaggtgggcagatcgcttgagcccaggagttcaaggccagtctgggcaacatatctagaactataggtgcgcaccaccacgcccatctatacaagaaaatgccaaaattagcccggcatgggggcaagcacctataggtcccagctactcgggaggctgaggtaggagaattgcttgagcccaggaggcaaaggttgcagtgagctgagaatcaggcccctgcactccagcctgggtgacacagtgagacactgcctcaaacaatgaggagagtaaatggttacatgcatgctattgttatatgtacatgcccttatgttatcccataagggataatgcaacaggatctgttcattattgaacagaatgaatattaagcgtattcaatattgttcagtattgaacattccttttcataaatgtaaatgagcatacttttatggtaaagcattaagttgcctatatttgaatttaaaaagcaaattttacataactctgacctgtaatcctagctctttgggatgccatgtcaggaggatctcttaaggccacaagtttgagaccagcctgggcagatcccacctctacaaaaaaaatccaaaatgagcccagcatggtggcatgtgcctrtagtcctagctactcaggaggctgagacgggaggatccctcctggctgcagtgagctacgatcayaccactgcactccagcctgggcaacacagcaagcccctgtctcaaaaaaaacaaaacaaaaaagtttttaaattaaaaaaaaactttgaaatggagtccaagtcaaagcaggtattcctaacctgaggtctttgaggatccacagattggtcttaaagaaatctgtggtactcttgaaattgtattaaaatgttttacatatatatatacacacacacatcaatacatatataaagcatatgtatgtaacatatatgtcacataagtgcatgtttgagggaaaaagggtccatagctttgatcagattcttaaagggattgctgaccccaaaaaaggtcacaaatccccaattttgatggattttgtgtcccttcaaaacatatttaatctgtctctccacccccttttccccttgctccaaatgcctgaaaggtttaacatttaaacactacttttttccctaatgtatcccacatttatctttatatgccactttttagtaatttggataaattgtcttttttaagaagttaaatgaaaattcccttcattagttcttcgatggacttggtgatatctgtatgaccacagggtttagaataaagtcgcttgtaaaaagtattattttatgccacatagccatgatctctgaatgtattttttgtgactttctgattgtaaaccattaacatatacgaaacaagacattctgtttagttaagaacgttagctttctgaggtcaaggatctgtttctctgttgttggtaactgctatccaacagtcccggaacataataggtgcggaatgaaaataggtgcagagcaaatgaaaaggccttcagtgtttaaagaaaataaacctaatttttaaaagatggctctgcagtctgaataaagtattgtagtccattcacacatttatgttagggctctagttttagaggctccagtgctaagactggaaactgaatattttctgtggaaaataaatgagcattttacttgtcacttttgagaagaaaaaaaaattatctaattttctaaatgttaagtagttccgacatcagcagcctaaagcaaaacacatacacccggatatttccattgtgattggtgttggcttaaagtatgcaggttcctacaggaaagtttaaaagtaaagtcactgaatttagttctcaatgatctttgatttaaacttcaaaactggattgtatttttaatttggagactagcttaagcccctgtgataaccacaatggaagaaacaagagcagatgggcaacctgacgacatgttcaaattcacgaaagcaaagacagctgcagatgcagagggatcagagtcgaaggacgcttctgaaaggtcaggaatcaggccgagaaacgtactctgggcaaaggaggtactctgggcaaaggagctgagagcgtatatactagaaaagaaaaaggacagccaaccctggcacctgacctagcggctctcaacaggcagagggccggcctgagcagactcggagagtccctgggaaaacagcatccgaacacgttgaccggaacatgggtgaggccagaaatttcggacggggcttttcagactggctcacaatgtcaaccaagaaggagtagcaaatatcgaggcagggcgtggagagtcaaaattcgacgccagggaaaaggcagcccacacaggcttccagagctctgagtgagagggggattccggggtggaatccctggagggatgtgagacggttctgtttgaatcggaagagagaaggaagttgagggagtttgagggaacaaatccaaagccccctggtctcttcctccttatcctcgcacacttaagacacgcacacacactactcttggttcctaaaattactcaacctccgcgttgcgtgtgcagcgaaatcccaggcgaaagcgaagtcagctttctgcttcgtccccggcaaaacccgttgcaccctccagacgcccaagctttagcggctggcaggagtcggaggcgtggttctgggctccgcgccgcgctcagcctctccaggcgcgtgtccccgggaacctgcgcgcccaggtgacgaccagggcgcggtctcgacagggaaaaccgggctcctcagactccccacgctgaccgcgcagcctggcttctcctctcccccgcctacattccacggtctcaaagcaagtgaaaagttgaggagtcggtgaagccgggaaacggtcctcgcagggccgtcgccagcggtttgccagcggttcctcggggagagcctcgatcagccggacaaaggcgctccaggcggcgcgcgaggaggagcccgggcggcggaggaagcgctaacccggctgggaagcagctggggacctcatcccgggccatttcctgaacggaacccggcccgggcggggggagcaaaggagaagcgggagggggtgggcgcgggcgcggtacccaccggttcctcccacgctgggctgcgggcgccgggcgctgggcgcacgtgctgaggctccatcgcgccagcccgcgcccgccggccgcccgggcgcgcagacccgggtccccgccgccgccgctgcgccggggctcctggatgcgcttccctcgccgcggtccctctcggccgccgccgccgccgccccggctccccgcccggggccagccaccggcccacccgccgtctccggcttccgccgcgctctcccgcccccgcgccggtcccttcctcctccgccgcctcctccttctccacggtcccgctcccctgcgcggctccgagcggtccgctccccgccaccgccgcagcctcccacgggcgcagaatccgcccctcgctccttcctccgcccccggcgccctccccttttcctccccgctacccgcccctcccccccgccgcccctcctcccggcgggtggcccgggacacacgtgacccccctgtcaggccttataaggcgcggaaccgaaagcggccgccgggtggtcacgggcaccgggcggccgcgcggaaaggagcggcctcccccggggccgggcgcgcggagagcggcgaggaaagcccgggctgggctgggctaggctggccaccgcgctggcgacgggagcagacgcgggtcccgggagacgcctcccagcgcccctgtctctcgctctcgccgtctcccggtgcagcccgcacccgcctccctccaaacgctggcggcccgcgctgcaggcgcctcccctcctgggggtgctgaggcttgagcgaaatcccactggacagtaaccggcttcagcggagcgaaaactcagccgcactccagctacgctccagggcaagctgcgccgggcaccgtttcttccttgtgacgttcaaaagaatgcagatgggttaccaactacaggagaggttaaacttgagggcgtgctttttaaattcattatcaacgttttcatggaaagaaccggctaaggagtcgatctgtcttccagttttatccctagactcaaattaggacatgggctggctctcagtgagcactcagtaaacagcaagtctcctcctgccctttgaaaaagcgtttcggatcatcttggcattgtaagcgattttcatctagttccagtccaagtgtgactggctttacacaggttactccccctcctggactttcaggttcgttctttcagcatcttttcagggccctcaatcatgccatcatgtcaaatgcattcacaaattttaaaaacaaatcgtcaagtcaaaaacacataattgatctagcccgtccccagccctctaattcttcaggatcctgcaaaccgacttctgtgccggctgttccacggggactgcactgacgaaagtcacttcgtggttttgaaaatcccctaaaccattgtatattttccaatgcccgtcttacttgacctatttgcagcgtttgcactgttgatcagatatttatttattttcagacaggatctcgctctgtcgcccaagctggagtgcagtggcgcgatcatggctccctgtatcctcgacctcctgggctaaagcgatcctctcgcctcagcctctccagcactgggactacaggcgggcgccacaaagctcaactaattgttttattgttagtagagacgaggggggactcactacgttacccaagctggcctcaagcgatcctttggtctgggcctcccaaaacgctgggattacaggagtgagccaatgcgcctggccccgatttttattcttgaaaccatcccttccattggctctgtgacacctcggtctccgtgtttcctaaccttttcttgctcagccacctcttgcatgttggagcatctaaatggtcttgcccttagtctgtctctaatgctgcctaggcacatggcttcaattaccaaccatgtgctgataactcataaatttccatttctgtcccacatctccagttctataaaacgaactttttaccagaaatctctacccagatgtcccatcggccttaaactcaacttgactaaaacagaactcaactttcctgccagctggcttttctctctagtctcattctcagtaaatgtcaccacaatccacttagtcacccaaaggagaaatctggaaattatcccaggcttttccttctctcatctgctgtctgcccatccatgcacctatcatttctgtctatcaccttccctccattccactgctttttgcctagtttcaggtctcttgtttcaagaccctgaaacactatattactctccttattagtctcactgcctctaagtttgttgcacctccacccttgccatctcacgttgtgaccgaagtaagccttctaaaatacaaatttttgaccaagtcattccccacatcagccctgccaatggctccccatagcctgcagggtaaagtcccgatatcttagccagggcctaagtctccactctctttaaacagtgagtttcttgcaccaccattccctgttgggccacttacttttatgctgtgccctcacatggagtgtcctttctcttacacagcctaagtttacctgctctttcaagattcaccctaagagtcacattccttatgaaatcatttctgaccctgctgcaggttagaactgatttcactgagctttctctacactaaatgcctctctcccccaattataatgctttagaagactttattaaactcagtttttatttatagtcttcctgatggcaagtattatgacagacttactttcgtcttcttagttcccagtacagttcctgacattagtaggtgctcagtgtttgtggaatgaattaattatgtgatgtaccttgagttattatatttttgtggcttatagaaaatcgttttcccatgcgttatctcatttcactcttgacagttctgcaaaagatatatcattatcaccttttatagaaatggaaactgaagctacaaaggaataaagcaatctgcccaaggttctactgtatatacttcagagccaggacttgaactcagtttgcccagttcagttcattatatgtttgcctgtttctatggtctgaatgtttatgtctccccaaaattcatatgttgaaatcctcattcccagggtgatggtattaggaagtaggaattttggaagactatttggtcatgagggttgagccctcataaatgggattagtgcccttataaaagaggtccagaaagagacttctgactccttctgccatgtgaggttaaagtgagcagatggctaactatgaggaaacgggccctcgccagacaacacatctgcatcttgcacttcccagcctccagagctgtaagaaatacatttctgttattagccacccaggctatggtatgttgttagagcagccgaaacagactatgacagctatccattatttttccccttaaattctgtttagtatgattctattttgtagatttttgttagtggttgccaagaatctctccatctttttattttaaaccagtctgagtcattatgttttaagtgtgtcttgtaaataacacttgaatttttatattattgacccgttctgagagtctgccttttagtagtctattttcatctgttttcatttatcatgtctattaattagaataaaaagttgtcataagaaagatccttccccctgcctcaccagacacacagtgttgctttctctcatggaacagtgccaggattagtggtcagtttgttgggggtggcttctttgttccacattgccgttccaatttctagagcattgcccttatctacagggtgaaagctgattagggagaccctgtttaaggaaggaagaagagagcataaaggagcacaaacccaactgcttaaggcccagacccagaagtgagtggtgacccacttctcacctgctcatatcccaatggccagaacttagtttcatgaccgtagctagcagcaaaggagcaggaaaatgaggtcactagctggacagctgtatcccaaccgcaattctattactaccgaagacttaacagattttgctgaaaactagcactctctgttaaattatgatgactatctttggatttattaccacattctcattttgtatttatttcactttctttttctttgcttcttttttctcctttcttgcctgctgttttattaattgaattgattgaattttctttagtttactcacttttctaaacacttctactgatttaaaatgtatacctcctgtttcaattcttagtgattacccttaaaatgttaacatttatacttaatatcaaaggttagttaatatctcccccttcttttcaagatcttaaacaaaagaaaaca

SEQ ID NO: 96750 - DNA, 92033 bp, Homo sapiens
cggaggctgaggcaggagaattgcttgatcccgggaggtggaggttgcagtgagccaagattgagccattgcactccagcctgagcaataaaagcaaaacactgtctcaaaacaaacaaacaaacaaaaaacaaaaatacaaaattagcaagacttggtggcgtgtgcctgtaatctcagctactcaggaggctgaggcacgagaattgcttgaacccaggaggcagaggttgcaatgagctgcaatcacaccactgtgctccagcttgggcaagagtgagactctgtctcaaaaaaaaaaaaagacttgtgggaaagataaatacatcaatacttaatcacactgcaacgtgatatgaccaaataaatccacaccaaaggaacatcatatttagaggtacaaagtaccatgggtacaacatccagctcagaattgttggagcagaggatggagaaggagagggtagaagtgatggatggggatgaaaagcaggtagggctcaatcttggaaatctttataggcaatgctagaaaagcctgaactttatcttttaggccatgattaaccaccaaaaattttcaagcaggcgaggaatagttaaatgtctgtcaatcataattcactgcagcctcaaactcttgagctcaagcaatcctcccactttggccttctaagtagctgggacttcaggtgtgtgccattacacctaactaatttttattgtttttttttctagagacagaatcttgctctattgcccaggctggtcttgaattcctggcctcaagcaatcctcccaccttggtctcccaaaacactggaattacagtgagacactgtgcccagctgttagatgtcttttttttttttttgagatggagtctcgctctgtcccgcaggctggagtgcagtggtgcgatctcagctcactgcaagctccgcctcctgggttcacgccattctcctgcctcagcatcccaagtagctgggactacaggcacccgccaccacgcctggctaatttttttgtatttttagtagagacgggattttactgtgttagccaggatggtctcgatctcctgacctcatgattcgcccgcctcgacctcccaaagtgctgggattataggcatgagccactgcacccggccgatgtctttttaaacacagcagtacggaggatggatgtgatagacagtagactccaggcaaggaatcctaaaaggagtgtcttgagacagtccaggtaagaaagaacaaaagccagactaaagcaagtcagtgaaggtggaaagggaagaacagtttcaaggagtatataggaggtcaaataagcagatcttgtttgatggtatgtatgcagcaagagcacaaggaacaataatgaatgccttgggaatagagatgttgagtttcaggttcatatgagagatgtgggtggagatatccactaatctgtctagagcttttaagagaggctgggctagaggtctgaaagtcacaggtgtaataaatgtagcaaactatgacagtgaagttgcccagagagaactatgcaagtgaggacaggggagatgcaacaactggagaagaaaagtggggtgactaggagaaggaggttcaaggagagagttgttttttgtcttttttttttcttttttgagacggagtttcgctcttgtcacctaggctggagtacaatggcacactctccgactcccgggttcaagcgattctcctgcctcagcctcccaagtagctgggattacaggcacgcaccactacgctcggctaatttttgtatttttagtacagatggggtttcaccacgttggccaggctggtctcgaactcctgacctcaggtgattcacccacctcggcctcccaaagtgttgggattacagggatgagccaccatgcctggctttttttttttttttttttttttgagacggcatctcgctctatttcccaggctggagtgcagtggcgagatctcggctcactgcaacccccctcccgggttcaagtgattctcctgcctcaccctcccgaataactgggattacaggtatgtgccaccatgtccggctaatttttgtatttttagtcgagacggggttttaccctgttggccaggctggtctctaactcctgacctcaagtgatctgcctgccttggcctcccaaagtgctgggattataggcgtgagccactgcgccctgctggaaagagtttttatacgttactgttatcaaacgcagtagaggagtaaagtgaattaagaaaagaaagagaggctgggcacagtggctcacgcctgtaatcccagcactttgggaagctgaggtgggcagatcatttgaggtcaggagttcgagaccagcctgaccaacatggtaaaaccccatctctactaaaaatacaaaaaaattagttgggcgtggtggcgcatgcctgtagtcccagctactcatgaggctgaggcaggagaattgcttcaacctggtagtcggaggttgcagtgagccaagatcgcaccactgcactccagtctgggtgacagagctagactctgtctcaaaaaaaaaaaaaaaaaaagaaaaagaaaaagaaagagagcctgtaatcccatcactttgggaggccaaggcaggcggatcacttgagatcaggcattcgagaccagcctggccaacatggcaaaaccctgtctctactaaaaatacaaaaattagccagacatggtcgtgggcacctgtaattccagctacttgggaggctgaggcaggagaattgcttgaacacgggaggtggaggttacagtgagccaagatcacatcactgcacttcagcccgggtgacagagcgagactctctcaaaaaaaaaaaaaaaaaaaagagagacagagaaaagaaagagccaggcatggtggcatgcacctgcagtcccagctactcaggagacctgtgaatagccaccgcactccagcttgggcaacatagtgtagtaagaacctgtctctacaagaaaaagaaaaaaagaaaagaaaaacagtagttggatctggtgattcggaggtcactggaaacttttcttagagcagcttcaatgatgctatgtggggcagaagcaggatcataggtggttaagcagggtccttttattttttttggagatggagtctcgctctgtcaccaggctggagggcagtggtgcggtctcggctcactgcaacctctgcctcctgggttcaagtgattctcctgcctcagcctcccgagtagctgggattacaggcacatgccaccacgcccagctaatttttgtatttttagtagagatggggtttcaccatgttggtcaggctggtcttgaactcctgaccttgtgatccactcgcctcggcctctcaaagtgctgggattacaggcgtgagccaccacgcccagccagcagggtcctcttttgagaatcttagatgaaaggcaaagagataagaagaagaaagccagtcaatagatgagttttgtttggttggttttaaattggtgagatctgagcatgcagaagggaaaatgccactggaaaagcaaagattattaacatagaaatgaaaagcaaaaacaaagtaattccctagtgagatgggaaggaatggggtttaaaaaccatgtggaaggcctggctttgaaggggttggttagatcagagtaaaggagaggactgtgggccacacctacctccattctcctcctcactgaagaatctttctttgcaagatgcttgatatgcctcattctctctcatagagcagagtccctgggaactgtgtgagtcactaagcaaagcatcaaaaacttcaaaaccaatctgattgccacactgaccaagttgcactgttacaattgacatgctgagccacaaactaggtgtattacctctaaaaacaacctgtaatcgaaaaaaatacgctttgagaaccactacattactaataagaacaaataaaatgccatgtatgttaattatacatcaataaaaagtcttttttcccccctgagacggagtcttgttctgtcacccaggctagagtgcagtggcatgttctcggcttaatgcaacctccgcctcccaggttcaagcgattctcctgcctcagcctcccgagtagctgggattacaggcacgtgccaccacgcctggctaatttttgtattcttagtagagatggggtttcaccatgttggccaggttggtcttgaactcttgacctcgtgatccacctccacctacctcagcctcccaaagtgctgggattacaggcttgagccaccacgcccggcccaaaaagtcattttaaaatgccacatacgtatataatattggagatagaacagctgtgttgtctaaggagctagtcattcaaggaagttctcatactctctacatggttttgggatttgtgatttactgtacctgaatccattcatacacagctcaatagtttccaaaatctgatttgtaatcacttttttcctaaacatatgtttaaaacaaaacattctcctcagttgaggagtgataaaagaaaaaaagaggctgggtgcgtggctcacacctgtaatcccagcattttgggaggctgagttgggagaatcacgtgagcctggctgttccagacctggtcaacatggcaaaaccctgtttgtacaaaaaatacaaccattagcttggcgtggtggtgtgcgcctgcagtcccagctactcgggaggctgaggtgggaggatcccctgagcctgggaggtccaggctgcagtgagccaagatcttgccaccgcactccagcctgggtgacaaagtgacatcctcctgtctccagaaaaaaaaaaaattaaaattaaaaaaataaaaacaagacaaaacaaatgctgattgaagaaattagtagtaccacccttcacaccacatgaacatgtagaacacagaagtgtgctcaacattgtacattcaattaacattaattttctctcttctaaataatagcttacgctttctccactagtctagcctggtaactttagtaagacctgtaagaaagattttgtgtttagctcaggtaggacagcaagaaagatgcagcttggagaaagaaaaccagatgaaatattaaccgggcgcaatggctcatgcctgtaatcccagtactttgggaggccgaggcgggaggatcacctgagcccagggattccagaccagcctgggcaacacagcgagaccctgtctccatttgaaaaagaaagaaagcaaaagaaacattagagcagttcctcattatttttacctaggaaaagacaagttttgataaagacttcacatcaggtctatgcagcactggaaatgagccgtgggttgtgagacagactctgtgcttaaaatgtcaaaccggcaaagtaggtttattattatcctcattttacagataaggaaactgaggctctgaaaggttattgacttttccaaggccacagaactagtaaagagcaaagccaaaaggtcccccgttccccacgggccccaggagttctccacacgtaacccgactcaccgccagacgccgaccagcgcttctgtccggttcaaacttcggaccaacctactcaccatgcgcatgctcactttcaaaacgaaaaacttactgagaacaaatgcgcatgttccataaacggagagttttgttgtgtatatattttttcctattcagaaagattaattacgcatgttcaatttcaatttacgaacttcagatatggtacgcatgctcactgtccaccgaacgctccagctgacaatgcgcatgctctagtcctccaagcgcgacttcggctggtgttttgcgcatgtttctgccagcgcctggatcctgccgatagttctgcgcatgtccactgcccactgtttggcttcacggaaccctgtacgcatgctcctacgctgaactttaggagccagtctaaggcctaggcgcagacgcactgagcctaagcagccggtgatggcggcagcggctgtggtggctgcggcgggtccgggcccatgaggcgacgaaggaggcgggacggcttttacccagccccggacttccgagacagggaagctgaggacatggcaggagtgtttgacatagacctggaccagccagaggacgcgggctctgaggatgagctggaggagggggtgaggcccggggtccccgggggcccgaggtgacagggccggggcggcggcgcgggctcaggaagcgcggtgtgtcctagagcgtggagacccaggggggctcctgaggagctgagggtcgcgcggcctgagacaggggagcgggcggggcggtcatggccctaggtgtgaggcctctgcggggctcgcaggtgcaggtcgcacccttagccccaggtcagcgcagccccgagcgatctgaagagggaaagagaacgggcgcgtggtcgattcctcgagctgttggacttgagtgtggcggggagcgggtggcgtgagcgtgtgttggggagacgggggctgctcttgctgggtgtcccgtaagtgcaggcgaagtgtggagggtttcccttcgagtctagaatttcaagtattgaatcttcagacctcccacaaccacctctcttctcggcctgtcgcttctctcctaggaagcgctcagctgttagaagtgacagctgaaaacttctgtcgggagtagcactgccgctgctgttacagccaccaggagttttatttcgggagcaagggggctctgctgcatcttccaatcttccagggtttgtttgtttgcttttttttttttmcccccttccgtgtgactttttaaaataagcatttataaggacacacggcacttgtaacctttccccaagttgaagatgtctgtatttttttcagaataattaatgtaattttgaggtggaaaaaaammccaaaaaccagttgacagccttgatttagcttgccagaaataagttgcctgaacagagacttgtgaatggtggtatgagggctttccttgctgtaatttagggtgctaaatttagaattgtatttcctaatgcatagcttggtttcaccctgctggcttagtggtttgttaatctttatggaataactttttttttccctagataaatttatcaaaaaatgacaaattgcacctgaagttcaaaaatgttgtcatactaaatcactgatcctggaccaaatgatcatcagttgataacctcttggtagtttagcatctaaattccaatgtctagttgaatacatgggttaatgacgtcagatgtttgctctaattacacaggggcttcctttcccttgcctcaccctcagtttttctcctctggcacctgccctactgttgacaaaagattgagatgatgtatataaagaattttgaacactttaagaaactaagtggcctaaaataatactgttcttcttgtttgtttcttttgttttgttttgagttgggtctcactctatcacccagactggagtgcaatggtgcgatctcagctcactgcaatctcagcctcctgggtttaagcgattgtcatggctcagcctcccaagtagctaggattacaggcatgcgccaccacatctggctaatttttgtatttttagtagagacagggtttcaccatattggccaggctgttctcggactcctgacctcaaatgatccaccagcctcggcctcccaaaatgctgggattataggcataaaccaccatacctgaccaatactgttcttttcataatcaaataagactaaatcaaaatcacacggtttagaaagtgggtattgagttgtgtgctttttcttttcttttcttttcttttctttctttctggtttttttgttttgttttgtttttgagacagtcttgctctgtcacccaggctggaatgcagtggcgtgatctcagctcactgcaacctctgcctcctgggttcaagcgattctcctgcctcagcctcctgagtagctgggactacaggcgcgtgccaccacacctggctaattttttgtatttttagtagagatggagtttcactgtgttagccaggatggtcwcgatctcttgacctcgtaatctgcccgcctcggcctcccaaagtgctaggattacaggtgtgagccactgcgcctggctttttttttttttttttttttgagacagggtcttcctctgtcacccaggctggagtgcagtggtgcgatctcggctcactgcagcctctgcctcccaggttcaagcgattctcctacctcagcctcccaagtagctgggattacaggggcgcgccacatcacctggctamtttttttgtattttagtagagatggggtttcaccatgtggcccaggctggtcttgaacatctgacctcaggtgatcacctgcctcagtctcccaaagtgctgggattacaggtgtgagccaccccaccaggctttttactttattttattttaattttttttgagatggagtctcactgtgtagcccaagctggaatgcagtggcctgatctcggctcactgcagcctccgcctcctgagctcaagygattctcgtgcctcagccttccgagtagctgggactacaggcgcgcaccaccatgcctggctaattgtttgtattttagtagagatggggtttcaccatgttgcccagggtgggcctgaactcctgagctccagcaatctgccagccttggcctctcaaagtgctgggattacaggcgtgagccactgcatccggttggtgtgtgctttttcaatgatgttttcatgcagaattccaattagcctcttaatcgaacataatggtacactagttacaattggaaacaaatatgagattactttcattatttataccatataccatactctttatcagttatgttggttctctatgacagtggctttggagcagggcaggggagaaaactggataggaaggtgctttatatcttcattagttgaactgatagaatttccagactgggtttattttattttatttttttttcttttctgagacagagtcttgctctatttgcccaggctggagtgcaatggcgctatctcggctcactgcagcctccacttcccgggttcaagcgattctcctgcctcagcctcccgagtagctgggattacaggcacccgccaccaggcccggctaatttttgtatttttagtagagacggggtttctccatgttggtcaggctggtccggaacttccaaacttgggtgatctgcctgccttggcctctcaaaatacaggtgtgagccaccgcacccagccaggtttattcttttttgaaagtacagtactctgttaaaattcctgtgtaaactgggacttttcttttcactttcytgtgtttcaagaacagtaggtgttccagggcttttgtcctgctgggtacaagcaagtaggattttgagaaggtgtgaggaggaggtcagaaaaattggtggaaataggaaagagaaagaaatatggccccgattttggggagagaaagtctggggaaagagcaaaggcaattaaagaggattttgaggaagagacttctgtaaaatatgtcttagcaacactttttggagttgaaaatatttctttttagtgtgttattttttctaagaggtgcctcaagatggataatggaagatttggagtacgattgggttgacaatccaaggagattcggtgacatccagattaccctgaaataaaaaaaaaaaaaaattctggaaaatgagagaagtttagattcttagaaaatcttctgatagtttctatttgtgaatttatagactttaatttattacacaaagtttttaaacattggtgcatatcagttttcctcattttatagtaaggaaactgaggcataggccatatgatagccaaagatcacatagtggtagtgtcttctgacttaattcagcaggcttcattgcacaggttcttcattgcatttactagttgtgtttataatgttcctctttgtggtatgtcaaaagtgaattcagattcctttggccatactcactctgtgacctggagtaaattccttaatctctaatgttttctataacatgagggttacattaaataagtacgtaaagtacagtactctcaaaatatcctggcgtattaagcaattagctagttcacagaaattcagcttgtcttgtcattgctaaggaaccaatcattcaggtttaacctcgtatacctagagacttaataattgcagttaaactcgaggtgctgtatttttacaactgtagtatcatagtgtgtatttttttttaaaactaattgatcccgtttagagagatgtgcctttcaaggtacgttacwgagtgactatgcgttagtaaatataggtatttccatagtttatttaattagagattaaaagatgagactaaatgatacatttatggacaaagttgaatatctgccacctaacttaaaaaagatcctgtttaaggccgggcacagtggctcatgcctgtaatcccagcactttgggaggccgaggcaggtggatcacgatgtcaggagcaggagaccagcctggccaatatggtgaaacccagtytctactaaaaatacaaaaattagccaggcatggtggtgcacacctctagtcccagctattcaggaggctgaggcaggagaatctcttgaacctgggaggtggaggttgcagtgagccragatcataccactgcactccagcctgggcgacacagtgagattccgtctcaaaaaaaaaaaaaaaagattctgtttaaatatctcagaggaatataatcaaagcctattggtaagaggggagtttttgggcggagggtgtcttttttgtttgtttttttgtttcactgttgatgatatcatttggggcagtaaattgaaactaaggaaaagttttccttcagagaatttagattgcaaaaatgttggaatcttctctgctctctatagcattaagagtagtagaaaactgtaatgcaatttaaaaaattctcactttgtactctaattcaaaatttgaaataatcacgcaggcttactgtacaagtttcagattgggacatcagatttttattgagtaaaaggtttaaaatttttgaaaaccaaagtgctatatagatagtatatactcaaatattcatgattatgaaaaattatagaaaaaatatcaatacttatcttgctttgtaatatatacttactataaagcagcaacttttttttattttttatttttttgagacggagttttgctcttgtggcccaggctggagtgcagtggtgcgatctcggctcactgcaacctctgcctcctgggttcaagctattctcctgcctcagcctcccgagtagctgggattacaggtgccgactaccacacccagctaattttttgtatttttttggtagagacggggtttcaccatgttggccaggctggtctcaaactcttgacttcaggcgatacacctgcctcggcctcccaaagtgctgggattacaggcatgagccaccgtgcccggccagcagcaactatttttaaatagcccaagagtttaggcaaagttctaccctttcttccatttcctctaagttactgaatcttgtcaatcctaatgaacacagcagacattggataggccataaagcttaaggcagcagaaaaaaattaggagtaaagagtttcctggccaggcggggtggctcatgcctgtaatcccagcactttgggaggccaaggtgggcagatcacctgaggtcaggggttcgagaccagcctggccaacatggtgaaaaccccgtctctattaaaaatacaaaaattagccgggcctggtgtcaggcacctgtaatcccagctactcgggaggctgaggcaggagaatcacttgaacctgggaggcagaggttgcagtgagccaagatcgcgccattgttctccagcctgggggacaagagcaagacttcgtctcaaaaaaaaaaaaaaaaggagtaaagagtttcctgtgaaagagagttgtcagtatgtattacataatgttatttgacacttcttgtgtgagccytctagaggtaacactgagtagcaggaaagatttgtgcctcaaatgcttctgtcctagacagtaacggtagaagttattagcacaatatgcaggtgccagcattataggtctggccagcttaggaaatgaaacatagctacagggcgtatcttgtgaggtggcttcaaaatcatggtccagtcttaactactctgtagtctttaatttagaattaagtaaaactaacattaaagaaaaaacaattatgtaataccagttttatcacatctggaagaagttagtcttttgtcataaaagtgaagccatcctaggcgattacgtagagcaacaaagacaaaaaaaacctttaaccatgaccacccccatatcccacacataaaagaaactgtatccagttaaaatggtgagaattggttttttcccccttgatactgccccatctctttgcctgggtataatcatgaagtgtacattcctggtattacatgttatcgtgatttggtcacaccatgagtgagttatgactaaaattttgtgttttgggggcatttgaacatttattctataagaatactatcagtttttggctgggtatgatagctcgtgcctgtaatcccagaactttgggaagctaaggtggaaggatcatttgaggccaagagttcgagaccaacctggccaacaaaacaagaccctatctgtacaaaaaattaaaaaaataaatagtgggcatagtagcacacagcacacgcctggcactagtgactccagaggctgagaagagatgatcactggagcccaggagtttgaggatgcaatgagctattatcctactacagcactccagcctgggtgacagaaacctaattgctaaacacacacacacacacacacacacacacacacacacacacacacacacacamacacacacacacccctatgtgtttttgttgtgtatgttggctgtgtactggtagttttgaagaaagatatattcactttaatatcttaactactctaaagttttgacatgattgcttaaagacttgtaatgttttagagtctattttctttttctttttttttgagatggagtctcactcttgtcatccagcctggagtgcaatggcgcgatcttggctcactgcaacctccacctcctgggttcaagcgattctctttcctcagcctcctgagtagctaggattacaagtgcccgccaccaggcctggctaatttttgtatttttagtagaggcggggtttctccatgttggccaggctggtctcgaactcccaatctcaggtgatccgcctgccttggccccaaagtgctgggattacaggcgtgagccacgcgcctggcctggagtctattttaaattaattagtatcctttcgtgtaaactgagagttcataatcagattagattgattttaaagctatatattataatgtcagtaactgaaattctgctgccaagttttttgttgttttttgtttatacaattcagtgactttgagtatatttacagagttgtgcagccatcaccaaaattaggttttagaaatttttaccactcggccgggcgcagtggctcaggcctgtaatctcagtactttgggaggccaaggcagatggatcacttgaagttgggagttcaagactagcctggccaacatggtaaaatcctgtctctactaataatacaaaaatacccaggcgtggtggtgcatgcctgtaatcccagctacttgggagactgaggcaggagaatcacttgaacttgggaggtggagtttcccatgagccgagattgcaccactgcattccagcctgggcaacagagtgagaccttgcatttttttttgagacggagtctcgctctgttgcccaggctggagtacagtggcgcgatctcggctcactgcaagctccgcctcccaggttcacgccattctcctgcctcagcctcccgagtagctgggactacaggtgcccgccaccacgcccggctaatgttttgtatttttagtagagacggggtttcaccgtgttagccaggatggtctcgatctcctgaccttgcaatccgcccgcctcagcctcctaaagtgctgggattacaggcgtgagccaccgcgcctggccgagactccatcttaaaaaaaaaaaaaggaaatttttatcaccctataaagaaattttggggctgggcatggtggcttacgcctgtaatcccagtactttgggaggccaaggcagatggagcgcatgagcctaggagtttgaaatcagcctgggcagcataacagcaccctgtctytgaaaaaaaaaaaaaaraaaaagaaaaaaaaagaaacagagttttggccaatttagttacttctgattctcaccctcagccccaggcaactaacctatttctcatctctatagatttggcttttctaggcccagtgtggctcatacctgtgatcccaacactttgggaggccgaggcaggaggatcacttgagactagcctgggcaacatagtgagacccgtgtctctacgaaaaatagaaaaaaattatccgtcttggtggtgtgcggctgtagtctcagctgcttggaaggctgaggttggaggatcgcttgagtctccaaggttgagtttgccgtgatcctgccactgcacttcaacctgcgcaacagaatgagaacctgtctctaaaaaaaaaaaaaaaaaaagctttttctggacattccatataaatggaatcatatagtgtatgaccttttatatttggtggctttcacttttttttttttttttttttttgagatggagtctcactctatcacctaggctggagtgcagtggtgtgatctctgctcactgcaacctctgcctcctgggttcaagtaattttcctgcctcaccctcctgagtagctgggaccacaggtgtgcgccaccacacctggctaatttttgtatttttagtagagatggggttttgccatgttagccaggctggtctcaaactcctgacctcaagtgatccgcctgccttggcctctcaaagtgctgggattacaggcgtgagccacagcataaagtttttgaagatcatttatgttgtaacatgtatcagtacttcatttctttttagggccaaatagttattctgttttatggctacagtgcattttgtttatccatttaccrgttgatgttcatttgagttattcattcagatgttcaactgaattgtgaataaagcattttttgtttcttttttttttttttttggagatagggtctcactccgttgcccatgctgtagtgcagtggcgtgaaaaagctcgctgcagcttcaccctcctgggctgaagtaattcttctgcctcagtctctcatgtagctgggaccacaggcacgtgccaccattcccagctaattttttgatttgttgcagagatgggggtctcgtgattttgtcccggttggttttaaactcctggcctcaagcaattcttctgcctctgcctcccaaagtgttaggattataggcatgagccacctcctcgcctggcctgaataaaccttttagaaggctgggtgtgggggctcatgcctataatcctagcactgtgggaggctgaggcaggtggatcgctggagtccaggaattccagaccggcctgggcaacgtgatgaaacctgttctctacaaaaaatgagccgatgctgggcatggtggcctgtattcccagcactttgggaggccgagctgggtggatcatgaagtcaagagtttaagaccagtctggccaagatgctgaaaccccatctctactaaaaatacaaaaattagccgggcgtggtggcgggtgcctgtaatcccagctactcaggaggctgaggcaaagaattgcttgaacctgggaggcagaggttgcagtgacccgagatagcaccactgcactccagcctgggcaacagagtgagactctgtctcaaaaaaaaaaaagaaaaaaaaagagccgagcatggtgctatgcacttgtagtcccagctgttcgggaggctgaagtgggaggatcacctgagtccaggaggttgaggctgcagtgagccatgatcgcaccactgcactccagcctgggtgatagagtgacaccctgtctcaaaaagaaaaaaaagaaaaaaaagtttttatgaacattattgcccagatctttgtggagcatatacttttcatttcttttgagtagatacattggagtagatttgctgggtcatgcagtagtaagtctatgtttaattttttaagagacgaacttttccaacacggttgcaccattttacattctcactagcactgtatgagggttccagtttctctcatcctcccccaacttacttttcctctttatcatctattatcctagtgggtgtgaagtagtttctcagtgtggttttgatttgcatttccctaacaactaatgatgttgaacatctttccatttgcttattgttcatttgtatattttctttggagaaatacctattcagatcctagctcatttttcaaaaattgggtgtgtcatctttttctttatatattttatttatttattttagagatgagatctcactttagagttctgctgtcaaactcctggcctcaagcagtcttccaccttggcctcccaaagtgctgggattacaggcatgagccactgcgcctggcctatttatctttttattgttgagttggagtatttatttatttatttatttatttattttgagatggagtcttgttctgttgcccaggctggagtgcagtggcgtgatctcggctcactgcaacctccacctcccaggttcaagtgattctcctgcctcagcctcctgagtagctgggattacaggtgcgcaccaacacgtccggctaatttttgtatttttagtagagacagggtttcaccacgttggtcaggctggtctcgaactcctgacctcatgatccgccctccttggcctcccaaagtgttgggatttcaggcgtgagccactgcgcacagcccggagtaattctttatgtatcatttttgttttttgagacggagtctgctctattgcccaggctggagtgcagtggcgccatctctgctcactgcaacctctgcctcctgggttcaagcaattctcctgcctcagcctccctagtagctgggattacaggtgcccatcaccacgcccagctagtttttgtagttttagtagagattgggttttgccatgttggccaggctggtgtcgaattcctgtcctcaaattatcctcctgcctcggcctcccaaagtgctgggattataggcatgagccactgcacctggcattctgttttttttttttttttgaggtggagtctcgctctgttgcccaggctggagtgcagtggcgcgatctcagctcactgcaacctctgcctcccagtttcaatcaattctcctgcctcagcctcccgagtagctgggactacaggcactcgccaccatatccagctcatttttgtatttttagtagagatggggtttcactatgttggccaggctggtctcgaactcctgaccttgtgatctgtctgtctcagcctcacaaagtgctgggattacaggcctgagcgactgcgcctggctgcattccttgcatattcttattctgtggtttttattttcttttttgagacagggtctcagtctgtcacccaggcaggagtagcgcaattttggctcactgcagccttgacctcttggactcaaagcaatcctcctacctcatcctcctgagtagctgggactgcagatgtgcgccactatgcctggctaattttgtagagaccaagtttcaccatgttgcccaggctggtctcaaactcctgagctcaagtgatatgcccacctcagcctcccaaagtgttgggattacaagcattagccgctgtgctcagtctctttgagctttcttgatggtgttggtgtttttgacatgcaaaggttttacattttcagtaaatcgatttattgattttttaaattgtttgtgcttttggtaatgtatataagaaactattactttccccaggatcatgaagatttactccctcctatgcttcttttaagaattttattttgttgttaagttttgggaggatttttttttttttgagacggagttttgctcttgttgcccaggctggagggcaatgacacgctctcagctcactgcagcctccgcctcctggattcaagcaattctcctgcctcagcctcctgagtagctgggattacaggctcccgccacaatgcccggctaattttttatatttttagtagagacggggtttcaccacattggcctggctgattttgaactcctgacctcaggtcatccacccgcctcagcctcccaaagtgttgggattacaggtgtgagccactgcgcctggcccttgggaggaccttttttttattattatttttttgagacagaatcttgctctgttgcccaggctggagtggaactcccaggcttaggtgatcatcctgcctcagcctcctcgatagctgggactacaggcatacaacaccacactcagctcgagttttatagttttagctcctgtatttaggtctttgctccattttgagttaatttttgtgtatagtgtgaagtagcatatagatatccagttgtcctagcatcattatttgatttgtatgtggatatccagttgttccaacacatttattgaaagattgcctcttgcctaatgaatatttttggcagttttatcaaaaattagttgacaatataaatgtaagagtttatttctgggctctyaattctattctgttgatctatatgtctttctttatgccagtaccacactgccttgatggctgtagctttgtaacatgttttgaaattgggaagtgtcagtcctccacctttgttctttttcaagattgtatcagttattttgggtcccttgcctcccttccccttccccttccccttccctttcgacagagtctagctttgttgcccaggctggagtgtgcagtggcgcgatctcggctcactgcaacctctgcctcctgggttcaagccattcttctgcctcagccctgagtagctgggattacaagcatggatgaccactccagttaatttttgtatttttagtagagatggggtttcaccatattggccaggctggtcttgaactcctgacctcgagtaatccacctatcttggcctcctaaagtgctagaattacaggtgtgagccaccacacccggcctggctcctttgcatttctttctttctttacttttttttgtttgtttgttttgagatggagtctcgctctgtcacctgggctggagtgcaatggtgtgatctcgctcaccgcaacgtctgccttacgggttcaagcaattctcctgcctcaacttcccgagtagctgagattacaggcgccctccaccacgcctggctaatttttgtatttttagtagagatggggtttcgccatgttggccaggctggtttcaaactcctgacctcaggtgatccatgtgccttggcctccaaagtgctgggattacagacgtgagccgccttgcccggtcccttgcatttcttcttttttttttttgagacagagtctcactctgttgcccaggctggactgctgcagtggcgcgatcttggctcactgcaagctccgcctcacgggttcacgccattctcctgcctcagcctcccgagyagctgggactacaggcgcccaccaccacacctggctaattttttatatttttagtagaggcggtgtttcaccatgttagccaggatggtcttgatctcctgacctcgtgatctgcctgcctcggcctcccaaagtgctgggattacaggcatgagccaccgtgcctggtggtcccttgcatttctatatgaaatttaggatcagcttgtcaatttctgcaagaaaggaacctggggttttgataggattcagttgaatccgtgaccaatttggttagtattgccatcttaacaatgttaaatctctgatccataaacatggaatgcctttccatttatttaggtcgtctttaattttattcagcaatgttttattgttttcagtgtgtaagtcttacactttggttaatttttttttttttttgagacagggtctcactctgttgcccaggctggaatatagtggcacaatcactgccacattgtagccatgacctcctgcactcaagtgatcctgccacctcagcctcctaagtagctgggactacaggcatgtgccaccacactcagctaatttttaaaaatttttttgtggaggcaggatcttactgtgttggccaggctggtcttgaactccaagtaatcctcctgccttggactcccgaagttatttatgccactgtacgtgccataaatttttttctaagctacttcttagtgatggtattataaatggaattgttaccttcatttcattttgggattgttcattgctagtatatagaaggttatttaaattttgcactcatttattcaatggtcagaataaatgtgtggccagcatgacttccaactgtttgacagtgttgcttaattattttgtctcgatcagccgcattttacactagataccctggactagttgtgggtaccttaggcttagtttatagcattatgttactctgtgtattaaaagcacatcaaaatagcactgtgtgtaaatcatttgatttaagtcatattcagaatgtagtgcctttaatttcataatacacaaaatatacattttttttttttttgagatggagtctcactctgtcacttaggctggagtgcagtggcgagatctcggctcactgcaacctttgcctcccgtatccaagagattcttctgcctcagcctcccgagttgttgggattacaggcacccaccaccacgcctggctaatttttgtatttttgtatttttagtagagacggggtttcaccatgttggccaggatggtctcaaacttctgacctcaggtgatccacccgcctcggcctcccaaagtgctgggattacaggtatgagccactgcacccagccgaaaatatacattttcgaatagataaatgtacattttgaaggaaaattcacttggttttattttttgattagtcatgagtagcctctacagttaagttgtcatgtaaaaaaaatttttttttttttttttttttttgagacggagtctcgctctgtcgcccaggctggagtgcagtggcgcgatctcggctcactgcaagctccgcctcccgggttcacgccattctcctgcctcagcctcccgagtagctgggactacaggtgcccgctaccacgcccggctaattttttgtatttttagtagagacggggtttcaccgtgttagccaggatggtctcgatctcctgacctcgtgatccgcccgcctcggcctcccaaagtgctgggattacaggcgtgagccaccgcgcccggccaaatttttttttttttttttttttttgagacagggtttcgctcttgttgcccagactggagtgcaatggcgcgatctcggctcactgccatctctgccttccaggttcaagtgattctcctgcctcatcctcccgagtagctggcattgcaggcatgggccaccacggccgactaattttgtatttttttagtagagatggggtttctccatattggtaaggctggtctcgaacccccaacttcaggtgatctgcccgcctcggcctcccaaactgctgggaccacaggcatgagccaccgcacgtggctttttttttttttttttttttttttttttttttttttttttttttttttttttttttttgagatggagtcttgctctgttgcccaggctagagtgcagtggcgtgatctcggctcaccgcaacttctgccttctgggttcaagcaattctcctgcctcagcctcttgagtagctggaactacaggcatgcgacaccgcacccgtctaatttttgtatttttattagagactggatttcatcgtattggccaggccggtctcgaactcctgacctcgtgatctgcccgcatcggcctcccaaagtgctgggattacaggtgtgagccaccatgcccagcctgtcatataaaattaaaagcaaaagctggggccgggtgtgatggctcacgcctgtaatcccagcactttgagaagccgaggagggcggatcacctgaggtcaggagttcgagaccagcctggccaacatgatgaaaccccatctctactaaaaatgcaaaaattagggccgggagtgttgactcacgcctgtaatcccagcactttgggaggctgaggtgggcagatcacaaggtcaggagatcaagaccatcctggctaatatgtgaaaccccatctctactaaaaatataaaaaattagccaggcatggtggcaggcacctgtaatcccagctactcggaaggctgaggcaggggaatcacttgaacctgggaggtggaggttgcagtgagccgagatggcgccactgcactccagcctgggcaacagagcaagactccatctcaaaaaatatatatatatacacaaaaattagccaagcatggtggtacatgcctatactcccagctactcaggaggctgaggtaggagaaacactggaacctgggaggcggaggttgcagtgagctgagatggcaccgctgcactccagtctgggtgacagagtgagactccatctcaaaaaagaaaaaaaaaaaaaaaacccgggtgcctatagtcccagctacttggaacgctgaggcagaagaatcacttgaggagtttaaggctctggtatgctatgatcataccccttcatagctattgactgcattccagtctgggcaacatagaaagacctcatctctatttgtaaaataatttagagtgaaattcccatagtgttgtttgtgtactgtgttttgttcattaccatatttgcctgttgttgaagtataagagaattgttaggctggtttatttcattcattctctttcagttatgagacaaagaattaaacctttaaattttatgtttattagattatttctgaaacttttaacatatttttcagggtcagttaaatgaaagcatggaccatgggggagttggaccatatgaactgtaagtttatatgaagagattttcattgtgttgtctttcttacaagtaggttttatcagttctatttcgtagcaatcatgtgattcctgtaacctgttcttaaatatgtagtcatatttatcaactcgatgtattgaatttggcaccaaaatctgatcaatataacctatcagagttttgagattatgtatggattttgaggaaaagatattaattcagattcagagtactaaatatgaatctgagttgttagtttaaagagccacagttttaatcttttcttacagaaaaatttgtagaaatgcctcaaaaagtcaaatgctttctgttttgcttaaatatacaaacagaaattcatacagtcattcaaacagaaattcatgcaatccggctgggcacagtggctcacacctgtaatcccagcagtttgggaggccaaggtgggcgggtcatttgagatcaggagttcgagaccagcctggccgacatggcgaaaccccgtctcttcttaaaattcaaaaattagccgggcgacatagcgagactccgtctcaacagcaacaacaaaaaagaaattcatgtaatcttaagtcattttagacaagctccattaggtgagtatggtgattaatctkctctgtattgtactctcaagtaaaaagcattagtgtaggaggagaatgagaagatagatcactcatgtagaaagcatttaaatgacagagacaattgctaccccttttggattctttatttttatttttttggagatggagtctccctctgtcacccaggctggagtgcagtggcacaatctcggctcaccacaacctccacctcctgggttcaagcgattgtcctgcctcagcctcccaagtagctgggactacaggagcgcaccaccacacctggctaatttttgttgggttttttttttttttttttttttttgagacaaagtctcgctcttgttcccaggctggagtgtgatggcatgatctcggcccactgcaacctctgcctcccaggttcaagtgattctcctgcctcagcctcctgagtagctgggattataggttcctgccaccacgcccagctaatttttgtatttttaatagagacggggtttcaccatgttggctaggctggaatttttgtatttttagtggagacagggttttaccatgttggccaggctggtcttgaactctcgacctcaagtgatccgcccacctcagcctcccaaagtgctgggattacaggcatgagccaccacgcccattggattctttaaatcaagctaataacttgaaaaaacagatacagagaagaagttttgtactatgatgtgaactaattgggtagttttggaaagatccctgattttctgctgacattgccaaatgaggttggataatacctaatttcatagatattttcaatgaagtaaatttgaataactrcaagactttttttctttgtcaacttaatgaactttttctaacttaccttagctttggggtgcttgatgcttatgaaaataaataattgtcttcttttactttgttgcactcctaagagcaaratgggtcaccagcagctgtattggagtcacccatgaaaattcaatcagggttcttgctcttgttgtgtctgctcaaactggcaaggtctgatccagaaatacggcctcaatatgtgcgccagtgtttctatcagtaaacgaaggatatagatttcattaagttggactaagtgatcttacttgaatggattatccaaggcatctacccaatgaaaaaccatagtacccctttatgcataaaataaacaattataaaaataagtaaataattgattgcccattctatgaacaaggaggcaaacrattatcaggccaccctcctcttgacctgctgttctgtttgtttagagcacaaataatttggtgtcatgtacttttttacttttacttacttagattacatttctctgtctcctttttcttgactatatgctgaaagtaatttaactttttgcaaatttatttttggttttgcttttcttcccagtggcatggaacattgtgagaaatttgaaatctcagaaactagtgtgaacagagggccagaaaaaatcagaccagaatgttttgagctacttcgggtacttggtaaagggggctatggaaaggtaggcaatatttttgaaatgagagctgttgtctgtcttgaatagattgatttttatgccctggttccagcagtcatcttcagtctttgtcagctatcagcaaaggatgtgatcatgaccacttagctggtatgtttgagggatgtacagaagttcagttttcccttcttttcataccaccacacatgtaaaagcctggcacataataggtactcagtcaaggttcatagaatacataaatagacaactgtaccaggcaaagtctattattaaagggttcattctttactttggttaaatggtatcctctttaaaaataaagccctccttgcttacaagagacatggcagtctgagttgttatctgttactgagaccttaatctcaactggttttctggagcaatagaattggggaagctgaaggaatatawaaagggggaagaaaactatttagtttcacagttttgcccaaggctttacaacttaagacgtcacttttatgagttctgcccacaaaactttttaccaaactattctcttatcaaaataatttagataataacttggttagtattaagttttaagaattatttttgctattgtgtagtgttaatttttgcaaagcagacatttgtagcctattcttatgcttaagaacacattgtaatttctaatcatcctgaatgtgcaacacatgcactttgaatctcacatgttttaggtgttgcatgaaaatgtttatagttgtctttcagtatgggggaggggtaagggagaactgattccaagacctttgcagataacaaaatctgccgacgctcaagtgccttatataaaatggcatagtatttgcatataagctacacacatcctcccatatgcttaattttttattttattttttatgatttttgagacagagtctcgttctttcccgcaggctggagtgcagtggcacgatctcagctcactgcaacctctgccttccagattcaagcgattctcctgcctcagtctcccgagtagctgggattacaggtgtgcgccaccacatccggctaatttttgtatttttagtagagatggggtttcaccatgttggccaggctggtcttgaactcctgacctcaggtgatccacccgagttggcctcccaaagtgccgggtttacagttgtgagccacctcacctggccatatttgtgttattttttattgtttgtattgtttattgttttttcccccaaatattttcattctgcggttggttgaatccacggctgctgaacctgtagattcagagggccaagtattagtacaaactattttaagtaataggtaaacagtaatttcctgccaactatttttaaatagttttatgtgaagcaagggcagtggcaagcaaccttgaaagaaatttatgaaatattttataatttttactgccaactatttttaaatagttttatgtgaagcaagggcagtggcaagcaaccttgaaagaaatttatgaaatattttataatttttaaggtggtattatgcctctgggaacactgtttatagcttgttctaagtaggattttatatattaatataaagtaacagtgtttattattagatggtcattgtccaacattaccaccagatggcagcagaacaaacaggaaagtcatgatcattaatgtggtctgttcttttagctgatcatttttgcacatagtttttataatataaactgctgtggcatatgtttcttataactaggaattaagggagtatgcctgacatagtttgcctttgaataacacacacttttttttaatccaggtttttcaagtacgaaaagtaacaggagcaaatactgggaaaatatttgccatgaaggtgcttaaaaaggtgatttccactccccctttttagtcctcacacaccatatttttacacttgatctcagccaaaaggctgggaagcaatcatatcatatttttaattgttgtaacattttggcctaaaatttgcagtcaaaaaaatgtatctcaagccaggtacagtggtgcacacctgtggtcccagctacttgggagactgagtcaggaggattgcttgaacttaggagttcaagggtagcctgagcaatgtagtaagacccagtctcttacagaaaaaatgtatttmttttcttttcttttttttttttttgagacgtagtcgcgctctgtcgcccaggctggagtgcggtggygcgatgtcggctcactgcaacctccacctcccgggttcaggtaattctcctgcctcagcctcccgagtagctgggactacaggtgcatgctgccacgcccagctacttttttgtatttttgatagaaacggggtttcaccatattggccaggatggtcttgatctcctgacctcagtgatccacctgcctcggcatcccaaagtgcagggattacaggcatgagccaccgcacccggcaaaaaatgtatttctaacacagttgcaatactttttagaatgtgaggtatgtttcattactgttattcctatttttatttctgcttggtgagtgtggaaaagagagctcttgcaattctttgctgaggtaactcttcactgtttctgatctccttatttctaagtaataagcatgtactgccatctctttttttttgagatgaactctcactctgttgtccaggctggagtgcagttgtacaatctcagctcactgcaacctctgtctcccaggttcaagtgattctcctgccctagcctccctaatagctgggattacaggcgcctaccaccacgcctggctaatttttggatttttagtgtagacggggtttcaccatattggccaggctggtctcgaactcctgacctcaggtgatccatctgcctcggcctcccaaactgctgggattacaggcacgagccactgcgcctggcctactgctatcttttttttttttttttttttttttwtttgtgacagagttttgctcttgttgcccaggctggagtgcagtggagtgatctcggctcaccacaacctccgcctcccaggttcaagtgattctcctgcctcagcctccctagtagctgggattacaggcatgtgccaccacgcccggctaattttgtatttttagtagagatggggtttctccatgttggttaggctggtctcgaactcaggtgatctgcccgccttggcctcccaaagtgctgggattacaggcatgagccaccatgcccagccaactgctatctttttaattcagcagttttcaatttttttttttagacggagcctcactctgttgcccaggctggagtgcagtggcgtgatctcagctcactgcaacctccacctcccaggttaaagcgattcctctgcttcagcttcctgagtgtctgggattacaggcgcccaccaccacacccggctaatttttgtatttttagtagagatgcggtttcgccatattggcatgctggtgtcgaactcctgacctcgggggatcggcccgccttgacctcccaaagtgttgggattacaggcgtgagccaccgagcctggcagtattaactttcttttatgcgagttaaggatttgtttcttgtttacttcaccctcctttatcctcatcctctcattttgttttgctttctttgaatctactattgtcctctgatgtcttccaacaactttgtaaaacacctttcagtctaatgttctttgatcaggcttataagataatctatcagttccatttatttcccagaggcatatcttaggaactttctatccacctgttcccatctggagtggtagctctttagtcacaactgttatgactggactctttcttcaccacaaccctggaatcctcttggctccttcagtgttggatcttttgtttcctggatcccatatcttcattttttccctttttcttagtttatgtccttgttttggtgacactatactagtggctccctcagacaaggtatataaagatacatttataataaaaatatatccatattgcatatttgagaatttctttacatttttatttacttgattgtttatgttattggagttgaaaattattttcacttagaattttgctcagttttcttctattcttgagagtttctgttgaagtgctttggcattctgattcccagtcgtttacacatggcctattttttctgtggaaatatttaagattttctctttatttctgatctaagtttttatagtgatgtgtgttgctttgactttgattattatttttatttagttagtttttgagatagggtctcgccctgtcacctagacaggagtgcggtgacacaattatagctcagtgcaacctcaaattcctgggctcaagctatcctcccacctcagtctcctgagtagctgggaccacagacacgcaccaccaggcctggctaataaaaaaaaatgtagagatgggcactcaccatgttgcccaggctggtgttgaactcctgggctcaagtgatccacccgcctcggccacccaaagtgctgggattggrttacaggtatggcccactgcgcccggcctatttaattaaattaattaatttatttatttttaagagacagggtctcactctgtttcccaggctggagtgtggtggtgtgatcatacttcactgtaacctgtaactcctgggctcaagcgatcctcctgccacaacttctgagtagctaggactgcagatgcatgccaccacgcccagttcatttttaaaatgtttcgtagagacaaggtcttcctgtgtttccccggctggcctggaactcctggcctcaagcagttgttctgttttggctcccaaagtgttgggattacaggcatgtgccactgtgcccagcctatttttattcttttaatcttaaagctttagtctttcagttctaggaaattttcttatgtgatttatttggtaatttccttcccactgttttctcttcttggaattgcaattagttggatgttggatctcctggaccgatcatctaatttttcttatcttttccacgtttccatttctttgtcttgtttactttcttctactcaatttttttttgagatggagttttgctcttgttgcccaggctggagtgcaatggcgcaatcttggctcaccgcaacctccgcctcctgggttcaagcgattcccctgcctcagcctcccgagtagctgggattacaggcatgtgccaccatgcccggctaattttgtatttttagaagagacagggttcctccatgttggtcaggctggtttcgaactcctgacttaggtgatccgcccgccttggcctcctgaagtgctgggattacaggcgtaagccactgtgcccagccatttgactaaatttttttttaaagctgttgtatttgtgattctccagaattctttctgttgtttttgttttatagcaacctgtttaatgagtataatatcttctcttacccctctgagagttttattttatttttttttaatgtttattattatttttttgagacaagagtctcactctgtcgtgcaggtttgagtgcagtggtgcgatcttggctcactgcaacccctgcctcctgcgttcaagcgattctcctgcctcagcctcctgagtagctgggattacaggtgcccgctaccacacctggctaatttttgtatttttagcagatatcgggtttcatcatgttggccagactggtcttgaactcctgacctcaggcaaaacgtccacctcggcatcccaaagtgctgggattacaggtgtgagccaccacgcccagcctctctgagagtttaattataattatttgaaatgttcttttgttttacgcatgttcttttttgactttctgttttctttgactttgatttagtcagttttagtcactttgttccatgttagaggccttctttagatgtctggtgtcattcactgattattcttttttttttttttttttttgagttggagtcttgctctgtcgtctaggctggagtgcagtggcacagtctcggctcactgcaatttccacctcctgggttcaagcgattcttgtgcctcagccacccaagtagctgggataacagkcatgtgccaccctgcctggctaatttttgcatttttagtagtgacagggtttcgccatgttgtcagcctgatctcgaactcctgacctcaagtgatctgtccacctaggcctcaataacccatccactgcgcctggcctgattattcatatttaagagtagaactctgaaaagctgatcagaagttctgtgtgtgtaagcttctctgcagggtagtcaagtggttagctggcacttgatcaacaacttcaaataatagtgtctgtagggctgggtgtggtggctcacgcctgtaatcccagcactttcggaggctgaggcaggttgatcacctgaggtcaggagttcaaaaccagcctggccagctggtttgggggcgctgaggcaggagaatcgcttgagcctgggaggtggaggttgcagtgagccaagattgcaccattgtgctctagcttggacaacaagagcgaractccatctcaaataaataaataagtaaatattgtctgtagatctttttttttctggggaggatcagttggtgctaagaaagttctgccattcatttgcctggaaaaagcattctggagctgagtgagagaagatggagatcttacctctcaacacgcggactttcactaaactcgagtttttacattagtactttactctgtggatcyaatctttcactttttttttttgtcccggggaatttaactctcctagggttagttcttcgacttagtatggagatgggagcctttttggtctgtctgttccttacacagacttgtagatgatctccctgtttttagcactccaccttctgccttctacagtcttcagttcctttaattttttcccttccttctaatttttcctctaatgtttgaaccttgctggggttctatagatagattcaacttcttttgtgtattcccctttgcaggcacttaggtttgatcttaccccactctgctacatcatggaccattgctttatccccactctgtcttttcaggtgtgggattccacatgtcttctagttttactgatggattatgtgtgtgtttgttttcttattcttgtttgggattgattactgaaaagattccactgtctttttttttttcctgggttcaagtgattcttctgcctcaacctcctgagtagctgggattacaggtgccygccaccacacccagctaatttttgtatttttagtagagacagggctttgccatgttggccaggctggtctcgaactcctgaccgcargtgatccacccttcttggcctcccaaagtgctaggattacaggcatgagtcactgcgcccggcctccactgtcttaaaacaaaagttccagtggagaactactttaaagacaatcaaagtgactttttaaaaaaattataagacttgtaaaactttggtccttcttgctgatttttatttaagcagtataaatgactcctcagtttgaaagctgaggaacaaatactgtgaccacaattttattggtaattgtctttaaaaagccatctagctattcttcacatcagtttcttcttcagtgggttgacattgatatcagctatttgactttcctgttggaattgttttagattaatgattttttaatctgtaaaacatgttaggtatagaattgaaggcagcataatagtgcttgtcccagaaatgtgaaaagaagtactggtcaagatttcttcttttatttgaaacagagtctcactacatcacccaggctggagtgcagtggagcgttctcagctcactgcaacctttgcctcttgggttccagtgattctagggcctcagcctcccaaatagctgggactacaggtgtgtaccaccacgcctggctaatttttgtacrtttggtagagacagggtttcaccatgttggccaggctggtctcaaactcctgacctcaagtgaccgcccacctcagccccctaaagtgctggaattatgggcgtgagccactgcgcccagcctctggtcaagattcttaactgattcattccttgtgatgtgttatttatgtcggataatcaggcctgaccatattaggcataattagatcttgggtgaagtatgtttttggcacaggtatctagtgaaaaaaagagtgcttgttttttttccccactcatggtgggtggggtggtatattgggaaatccatagacttaattactgctaagtgtcaggcctcattctggggcccagggatccaggacctaagctgtttgcctctgcttttgcttggttgccattgtttcccattcttggggttcttttcttaatcctggctagaggatctgatactgtctccttccttgtccttgaaagcaagctcatagcaaaaataatgaaaataaagatgtcattagggttaagttcagggctttcatttctaaatccccaagtaagatgactataggctccctttgagttccttccttctgattttaattatcctggaggcagagtactaacccctctgacctgagtgtgtggtaagtgtatacctcttcccccagactttaagatgaaatcagagtagaaccaggtatccccttaagtgagttgtttcaatctggacattctgtctggatttattagttctcctgggactgtttacttcttataggaatggtaccattcaggtatttgcttagagtggaatagtgaggaaaagactatcaacagccatcacccgaccctaccagttgcagcaaaaatataccatggaagcaaaatactattgcctacggcattagttcacctcccactgtacattttagaacctttggccaaaggtgttctccacctctgaaatattgcggtttcatagaacaataactttctcacttttgacttacttgattcctacaatgcctgttttttggccctaagccctttagttaataaattttagttaataaattttcctcatgtacaatttgagagttaactgcagatttcatagcacttcacccctaatttcatctatacatctcctaagaataagggcattttttttttttttttttgagaagcagtctcactctgtygcccaggctggagtgcagtggtgcaattttggctcactgcaacctccacctcctgggttcaagcgattctcctgcctcagccccacaagtagctgggattacaggtgcctcctaccacgcctgcctaatttttgtaattgtagtagagacgaggtttcaccatgttggccaggctggtctcaaactcctgacctcaggtgagccgctctcctcggcctcccaaagtgttgagattacagacttgagcctccgttcccggcctctttttccttttgtagttaacaagtgatctgtggaatgatagaaacggtgtgaatattctgtcctataataatctttacttaatggttttatctggattgtttcttgcccaaatattactgtactgtagtgattataaaatggagacttttctattttttctgtattttttctatattgtcattagtctgtaaagatttttttatactcctttttttttttttttttttttttttgagatgaagtcaggctggagtgcagtggtgtgatctcagctcactgcagcttctgcctcccgggttcaaactatcctcctgcctcagcctccagagtagctgaractacaggcgtgcgccatcgcgcccagctaattttttgtatttttagtagagatggggtttcaccatgttggccaggatggtctcgatctcttgaccccgtgatctagccaccttggcctcccaaagtgccaggattacagacgtgagccactgcgcctggccctatactctcttttaaaaaaatttgtttktttttttttttgagatggaggttcactctggtgcccaggctggagtgcaacgatgtggtcttggctcactgcaacctccatctcccaggttcgagcaattctcctgcctcagcctcctgagtcgctgggataggtgcgtgccaccatacccagctgatttttgtatttttagtagagatggggtttcactatgttggccaggctggtcttgaactcctgacctcatgatctgcccgcctcagcctcccaaagtgctgggatgacaggcatgagccaccgcacctggtctttttttttttttgtgagacaggttcttcctctgttgcccaggcttgagtgcagtggcatgrtcatggctcaccacacccttggacaccaggctgcctcagctcactgcaacctctgcctcccaggttccagtcattctcgtgcctcagcctctggagtaacgggagtataggtgtgtactatcacacgtggctaattcttgtatttttagtagagatgaggtttctccatgtggggcaggctggtctcaaactcctggccaacatggtgatccgcctgcctcggtttcccaaagtgcttcatattgttagccctaattctagtccaattccatagcgttcttttttatttttatttttttatttttgagatggagtctcgctttgtcccccaggctggaatgcagtggtgtgatctcggctcactgcagcctccacctcctgcgttcaagcagttttctgcctccgcctcctgagtagctgggattacaggtgcctgccaccacgcccggctaatttttgtatttttagtagagacggggtttcatcatcttggccaggctggtcttgaactcctgaccttgtgatctacctgcctcggcctcccaaagtgctggaattacaggtgttagccaccgtgcccgaccacattcttctttcagttcatatttggatatcctttttttctacagtgagaagaactctggtaacaacataaacgcactcatttgttcagttgtacaatatgtgcataatgaaaattgtaataccaatagtatttccagctacaaacctactaagtttgatttaatatttctttgcaattttttgtgtgcttacatataggccactaagggtgtgcagtctaaaattacttaaatatctttttctcgctgggtgcagtggctcacacctgtaatcccagcactttgggaggccaaggcgggcggatcatgagctcagttcgaaaccagcctggccagcatggtgaaaccccatctctactaaaaatacaaaaattagccaggtgtggtggcaggtgcctgtagtcccagctacttgggaggctgaggcaggagaatcacttgaacctgggaggcggaggttgcagtgagctgagaccatgccactgcactccagcctgggtgacagagtgagactctgtctagaaaaaaaaatctttttctcctatatcttttttctctttctctttctgtggtaaagttattggtgtaatagtcaattaaatttgtgtattcctattgtattcagttgtacttcctacccctcatccttgttgattttattttatttttggaactcattaaacattaatatggttcaaaaagaaaaatctacattttataattacagtaatatttgatttagggaagaaaaaaatggatgataaaaccattggggttttactcagaaggtattctcaaaagtcttatttcttttccttcccttccattatcattagcttttagtttatcttagttgtcttcatttttgcaggcataagcagatacatattatatatattctcatttcccctttcttgtacaaaagatagcatagtatccatgctgctgtacttttaagtactcttttgtatcttgtttttatagaaatttttcttatttttattttatttatttatttatttatttatttatttwtttgagacggagtctcactttgtcacccaggctggagtgcagtggcgtgatctcggctcactgcaagctccgcctcccaggttcatgccattctcccgcctcagcctcccaagtagcttggactacaggcacctgccaccatgcccgactaatttttttttgtatttttagtagagatggcgtttcaccgtgttagccaggatggtcttgatctcctaacctcattatccgccctcctcggcctcccaaagtgctgggattacaggcgtgagccactgcgcccggctgatttttcttatttttatagctttgttacatgttgtgtagattccataggttttgggccaatatcctatgtctgagcatttaggctgtttctagtgttccactttcacagataatgttgcaaccaattacctgtgtatttgctttccatattacttatggagatgtaccatcagggtaacttcctggaacttatacctggcatgtctaaaacagggcatcattttcccaaaactttttcactttcttttgccaatattgaatggcaccattatctgtcctattacttatgcagaaataaaggtatcatcatttcttctcataactagtttgtcagcaaatgcaaattatgtattagcctttcatttttttctatcttcattttcttatagatcttcttagttggtttattatactagcctcctaactagtctcatttctttcctaatactccctactgctactagatgtgtctttcataaagccaaaggtgtgttcatttcacccagaccttcctttgcccagacgttccatttcctggcctttgcctacttctctagcctaatctctaaccacttctaaccataccaaactacttgtagatttcccagacgtattctgtcctcttttgcactggaatgccttttttttaccttctacatttctttctttcttttttgtcttttttttaccctttttgtggagaatggggtcacgcttgttaccaggcagatctcgaactcctgggctcaagcgatcctcctgcctctgcccacctaagtgctgggattacagacatgagccaccrcgtccaggccacatttcattttaataactttcaagcgagactttctgctaggtcagatgtrgttcccctgtttacccttaccatcctgcacttgcctacattgacttgtctttttttccctgagactttgggctcctgtcgacttttagactcctatggacagggcattccttctattctgctttcttggcacagcctggaggatggtagacactcaatagtttgtgaatatatgaataaacttgatctgattacagatttcttttttaaaaagtctctttaggtaattcacttacrtgttcactgcaaaaaatccaaactgcacagaggcatatataaagtgaatgttttccattaccccatctcagtttctagtgggaactatggttaatagttcaatattggcaggaaaaacacaaaatagattttagaataaaatagattatagaataaaaatgttcactattttgttcttatagatgatctcttttcctttaggcaatgatagtaagaaatgctaaagatacagctcatacaaaagcagaacggaatattctggaggaagtaaagcatcccttcatcgtggatttaatttatgcctttcagactggtggaaaactctacctcatccttgagtatctcagtggtcagtacacagagtttggtgtaattatttgcatttgctccagaaactgggtcaaaatgttatttttcaatggaagaatactttttcccattatgatcaaatagtgcttaaaattgatgagtacactgaagtacaaaattcagatgtgaccaaatgtttctattggcagacaaatatggaggaaactaaagatttttttccctcatctgtaaaattttattttaattcctttgtaatcactcacttaacagaaaaacgaatacctaagtgatgcagagccatcaaattgtagtggggtaagatactgtaatttaaataattgggaagattatttaacatactgactatttttggaattgggtctttaaacaagagtttttagtttaatgtagccttagtgatggggtatgtagcttataatggaaatcatccatatttgccagggcctaccacctcgtaggaacttgttgattccatatcatttctagatcacaggtgtctatttatttttttttttgagatggagtttcacactggtcgcacaggctgtagtgcaatggtgtgatcttgggtcactgcaacctctgcctcctggagttcaagcgattctcctgcctcagcctcccgagtagctgggattacaggcatgtgccaccacgcctggctaatttttgtatttttagtaaagatggggtttcaccatgttggtcaggctggtctcgaactcccgacttcaggtgatccacctaactcggcctmccaaaatgctgggattacaggtgtcagccactgcacccggccacaagtatctatttctagcaaacacagttcagttctctgagaaggattttgcagtaacgtgtaacatggaacagaaagctacagaatgtagcaactgttttgtgactattgccattggaaaaactttttttttttttttgaagatggagtttcgctcttctctcccaggctggagtgcagaggcgtgatatcggctcactgcaacttccgcctcccaggttcaagcgattgtcctgcctcagcctcctaattagctgggactacaggcatgcgccaccacacttggcttttttttgtatttttagtagagctgggctttcaccatgttggccaggctggtcttgaactcctgacctcaggtgatctgcccaccttggcctcccaaagtgctgggattacargtgtgagccactgtgcccgcccggaaaaactttattttgacataatttcatacttaacacaaaaagttttaagagtagtataaagaattcctatgccaggctcagtggctcatgcctgtaatcccagcactttgggaggcyaaggtgggcggatcatgaggtcaggagtttgagaccagtctggccaacatagtgaaaccctgtctctactaaaaatagaaaaattagctgggtatggtggtgtgctcctgtaatcccagctactcgggaggctgaggcaggagaatcgcttgaacctgggagacggaggttgtggtgagctgagatcgcgccagtacactgcaacctgggcaacagagcaagactcagtctaacacacacacacacaaaataaaagaattcctatatatttctcacctagattccccagatgttaccatttcaccacatttattttgttttatcctatgtatatgtatatatgtgtatacatatatacatgcatgcatacataattgttttgaactgtttaagagagtgttacagacatgatttccctttacccctaaaatttcagtgtatgttttctttcttttcttttctttttttttttgagatggagtctcactctgtcgcccagactggagtgcagtggtgcaatcttgggctcactacaacctctgcctctcgagtagctgggattacaggcacccaccaccacgcccagctaatttttgtatttttagtagaaatggggtttcaccatgttggccaggctggtctcraattcctgacctcaggtgatccgcccaccttggcctcccaaagtgctgggattacaggtgtgagccattgcacccagcctattcagtgtatattttctaaaatcaaggacagtatcttacataactatactaaaatgatcagaaataggaaattaacattgatgcaattataactcttcttagtttcctttaatctggaacatttcctcagtctttctttgactttcataatgttgacatttttgattaggacaggccagttagtttgtagaatgctttgggtttagctgatgtttccttagtattagattcaggttatgcaattttggcaggaccattgaagtgacattgtgtcctccttaatgcatcagatcaagaggtacatgatatttatatctttgtcccattacttgtgatgttaactttggtcacatgtataaggtggtgtctgctgattttttccatggtgacgtttttgtctttgtaattaataagtatcttttgaggagatactttgagattatttaaatatctttcatcaagctctcatgttcagttttgttgttttttttttttttgagacggaatctcactctgttgcccgggctggagtgcagtggcacgatctcagctcactgcaacctccacctcccaggttcaagtgattttcctgcctcagcctcccaggtagctgggattacaggcatgcaccaccacacccagctaatttttttatttttaatagagatcacccctgacctcaggtgatctgyccgcctcggcctcccaaagtgtagggattacaggcgtaagccactgcgcccagcccacattcagttttgacatccattgaatcttgcctgcaacaattaattgtgatgtttgccaagtactttttcttattccgtcacgtcttcttcatttattacttgggattctactgtaataaagaactttctcttcttccccctttaaaacatttatgtattcatttatttatgtcattgtggacttagggatcctaatatcattcaatgtgatataaccttttattatcattatttattttgatactcaaattgtgccatgttttttactaggccagtgccaggtttattctgtttatttaagggttctgaaaatacgaaatatgagcattcactaaaattagtgagggtgatttaattgtagactatcatttttctacctatgggtaaaatgttaaagagtctttaatcaatatatatattttttaacctcargtctggaatctacagatattttaaagtttgtagatataaaacctggaattccaagccagttctagtttttaaatatatgtgtgtcacagaagaataagaatgctactaaaaatagaatcctgaggacttagttttaaaacctataatttttaggatctgtttttcatttttaaggggctgatgtcttttaattatggttagaaggaaagcacaaactctctcattagaagtgggttggaaataaatattgttttatttataatgttttttctttttctttacaggaggagaactatttatgcagttagaaagagagggaatatttatggaagacactgcctggtaagtgaactttttgtggttgcatagattcaggtaattacaagcaaagccccattcccactatgggcagccacatgattcagtaaattgagctggagccagtcactcactcaggacctcaagggggagaagcagttttgggactgggcagctatggaggtcacatcattcctttgcccttaggcttgagtggaacgctcttcacaccagttgttcctaacagaaccattctcattgcggctttctttccttgaattggtaagctgcctgccttggctgtgggtgagtgtggtttcccagtgaacctttatgtgtggaacaatggaaattatcagaaatcatccctttttttttaggctttctatttctcaaggtacagtcttagggaggtgataaacctgggcatatcatctgtagattgattatgtagtcagggtgggatttaccctcctatttctaaacatgtcatctgcttcaaattaaaaatatgcacatccttttgtgaagcaacaatattgggtcacaataaatcagtttatcctacacattaatttaatagaaaacaacacttaaatgtttttttctaccttgattaccaaaactgcattccattgtttaatttcaggccttttctaacaaagaagctgcatttaagagccttagggatgaagtgcccttttttggaggaggctcactgagccgtgttggaggctgtgtttgtggtcgtgctggctgtgaaactgcctcagtcctctaggacacaccctctccatcctggagtaatctgcaggattgcaacattgttatgcagccagtattgcagtgccttgtgcttttcgaatccagacagggttgattcagccctttattcttttgaggtagataaatttgggtgtcacacagtttatagttgtgggctggctggcaggtgggagggcagatactgtgggcctcagctgtctataaatatgtagctgtattaagtaagggatgagtgggcttctaagggtcaggttataagataccttttgaaatcaagatgtgatctctgagaataacaaagttcctatttcctatgggattttaaagttgggtgtggatgggagaaatttgcttgaaatgaatggctattagcttaattcctacacagacagaacaaaacatgaccaatggcagtttagcatattctggacatctttgcaattttagcaatatattctaatggcaaaataaagcactttatagtttcactaaaatgagtgaaacataaatgtccccatgccttttggcagcatcctatgccatctctttttccaatacatccccctaccccactaatttggtctttggtgcatgtctgtttctttcaaggaattttgctccatacgtaaactgctttggatagattacactctttttaattttattaaatcacttttgtttccagcttttacttggcagaaatctccatggctttggggcatttacatcaaaaggggatcatctacagagacctgaagccggagaatatcatgcttaatcaccaaggtggagacataccgtaaacaattctatagtaaataatcatcttaaaatcctcccacataggtcgtggccattttcaaagccccaaattcatctctctattttgtatatttcctccctcagaattcatggcatcatagtacttgctgatattttaagtctttaggtaattacgcttggtgagagtaaaagaagttgaggataatagtcgctcaactgccttttttagtttaatccttactctttatagtttttcatgtttttggaatctttacatcaaatgttgtataatgttttagactgtaaaagccagtctaaacattaattttggcttgttacttaaattgaaaagtgaatctcaattatataagttgagttttaataatgaaaatatgtaaatattggctgggcrcagtggctgacacctgtaatcccagcactttgggaggctaaggtgggtggatcacctgaggtcaggagttcaagacgcctggccaacatggtgaaaccccatctctacaaaaatacaaaaaaaaaaaaaaattagctgggcatgatggtgggtgcctgtaatcccagctactcaggaggctgaggtgggagaatcgcctgaacccaggaggcgaaagttgcagtgagccaagatcgygacattatactccagcctgagtgaaaagagcgagactccgtctcaaaaaaaaagaaaatatgtgaatattagaagctatgcttcttacagtaggttttattaatgctgggaaaaggattgaaattgaaccaaagtatttgataaaactttggaaatatgatgtttagtaggcatcaggttactttttttttttttttttttgagatgggggtctcactctgtcatccaggctagagtatggtggcatgattacagctcactgcaacctccgcctcccaggctcaagtgatccttccaccccggcccctcaagtagctggggccactgtggcacaccaccacgcctgactaatttttggtattttttgtagaaatggggtttcatcatgttgcccagggtggtctcaaactcctgagctcaattgatctgcctgccttggcctcccaaattgctgggattacaggcataacccaccttccccccagccagaatcagtttattcttgctgtttgtttgtaacaacaaacataaacatcagagagactgataatctatacaactatagatatagcacagtgagccttgactacaactgcatgctgctaaagacagctcaatttatgctaatctgggctgtaggtagacttggcaattcactcgtaccccaaaggagcaaccagctgacccagggtatctagaaggtggtagcagctgctaatccttagatgtctacagaataatccatgaggtagttaattgtttcaaactcttagaaaatgatgtatgaacaactgaggctcatataaacattccagattatactcctccacccaccttttttttttttttaaggagaaatgatatacttaactgaatatatcatgggaatcagtgtctcttccttcctctcatcaacacctcctcactccccaaaacgtggattctgatctgaattataagtcacaggatagaataggggagcgatagaatagttaacttctttgatttataaggttgagtgtatcagatggttctgtgaaaataaaggccatacttcttctgtatcagagtgtagtatatatttacatttgaatcaataggtcattgtgccttttctgtgaaatgaacctcaaatactagagtccctgagattgttgaaccacttgttatgacagtccagtaaagaaagctaaacttgaactgaaatgatctttgtgtaaggtggtaagttttttactttctggatcagtgatgattgattcatactatctagcaattttctttctttcccctaattggtagcattgggcagaatgagctaccttgttataatgagtttctgagaccattttaaggactcttcacagttcactgtgataaaagctatatatttgaagtactgtctcacacctttgttcaaaaggtacagagtatgtttattggggtctgtgtacgtaaactagacttcataaaacagttttcccaggatttttctttttcaggatggtagagaattttgtatatacttaaagctagagccttaaacaggttatttcacttttttctctatctttattttctctttactagatagattgtatcattggcaaaaggtgactttgccctagccttaaacagttagcatcccattttatggatggtaccttgttcttgacatctgcaagaaaatttgaggcaagaaaagttaaatggaaggatagattaaagtattatgtgacatgttcaaacactgcacatacttataattckgagaataatcatgctgtaatctttcattgtaggtcatgtgaaactaacagactttggactatgcaaagaatctattcatgatggaacagtcacacacacattttgtggaacaatagaatacatgtgagctacatgttaaacataattggtttgggggtaatagctaattttacctgttttaaggaatagtatctgttttctgtaccctcattgactctgtatattgtttttaaaattctaattcagatgatatgcaaatgggtgaatttttaagcatattattttcctcattgtagggcccctgaaatcttgatgagaagtggccacaatcgtgctgtggattggtggagtttgggagcattaatgtatgacatgctgactggagcagtaggtgcacagttaaaagctgcatgtattattggtctgtgctgagtcactatagcaagagacctgtcctgtgctttctgaacatgttaccagtggagttttcaaagcccaaagatttgttattagcagtttaacactaataatgctgtatgattatatgggatcccatactttccgaaacattttcttttaaatgatctatgtcatggcaggcctgtgaaatagatgttgaatagataatgcccttattttataaatggagaaattgaagcataaaatcacatagctcacttatcacacagaaagttaatggtggaaacacaggcttccttccaggacactgctacttcctctgtcctgttgcttaaaaactgcacgtctgccggccacagtggtgcatgcctgtagcctaagctactcaggaggctgaggtgggaggatcatttgagctaaggattattaatagaatctagccttgacaacatagttgagaccctgtctgtaaaacaaaataaaggtctttagcagttagcccatttcacagcatacatttctgatctccatgtataactaatttaggaaatggataatattattcaaaatttgtttcttatatgctaatatttttctctccctgctaatatttttcacttgtcttctactcttagcccccattcactggggagaatagaaagaaaacaattgacaaaatcctcaaatgtaaactcaatttgcctccctacctcacacaagaagccagagatctgcttaaaaaggtaaggttcttaaatggtcactgacactacaagattcaatgactaggatttaactagatagaatttaatgtatattttgaataaagagtcatatataaatattgaacaaaaaagtcttcaatttttgaaggcgaagtacagatttgtttaaagactttcttttcatattctttttttaaattttttttttttgagacagggtcttgccctgtcacccaggctagagtgcagtggtgcgatcttggctcactgcaacctcagtctcccaggttcaagcgattcttccgcctcagcctctcaagtagctgggattacaggcacccgccaccacgcccggctaatttttgtatttttagtagagacagggtttcaccgtgttggtcagtctggtctggaactcctgacctcaggtgatccacctgccctggcctcccaaagtgctaagtgctgggattacagacccttaaacaatattaagtagtaattagtaaactatattttcttttcttttcttttcttttttttctgagatggagtcttgctctgtcgtccaggctggagtgcaatggcatgatcttggctctcactgcaacctccacctcccaggttcaagtgattctcctgcctcagtctccctagtagctgggattacaggtgttcaccaccacgccaggctaatttttgtatttttagtagagaaggggtttcaccatgttggccaacctcgaactcccaacctcaggtgatccacctgcctcagcctcccaaagtgctgggattacaggcatgagccactgtgcctggccaataaactatattttctcaagccaaagtagacaagcacagtctaaaaaggaaaaaaaaaaatcagtttgactaaggttctttatccaagctttttttcctctttaaagctgctgaaaagaaatgctgcttctcgtctgggagctggtcctggggacgctggagaagttcaagtagggattggcatctttggtgttttgtggggaagataatgctagttttatgtatttctgagggttatatgtagttgcttataagtttagcttattttgtgacttgtaacttcaaaaaggtgattaatttatcaatccagcaaagtctagtcccctcaacttttcttcctgctttttttttcctaggctcatccattctttagacacattaactgggaagaacttctggctcgaaaggtggagcccccctttaaacctctgttggtaagtrtacatgaaagtgtataattgggtgcagtggctcacgcctgtaatccccaaactttaaagggccaaggtgggaggattgtttgaggccaggagttcaagaccagcatgggcaacataacaagactccatatctacaaaacatttaaaagttagctgggtgtggcggcttgtgcctgtaagtcccagctacttgcaaggctgaggcaggaggatcgcttgatatttttttagaataagaaaaatctcagagcagacagaaacattatttttattagcagttcaaagatctctggtctrtcctctccagcatctttattttattttattttgagatggggtctcactctgtcacccaggatggagtgcagyagcacgatcacagttcaatgcagccttgacctccccaggctcaggtgattctcccacctcagcttcccaaatagctacgactacagacacgtgtcaccatgcctagctaatttttttgtattttttatagaaatagggttttgccatgtcacccagactggtcttgaactcctgggctcaagtgatccacccacctcagcctctcaaagtgctgggattacaggtgtgagcttctgcacccagccaagcatcttttatttttgtactatcttgtaaagaactaaacccagtggcaattgactgtattagctatttttaagtcagttacctaagacaaatatttcaggtagttgggactttcctttttttggtttgttttattttgcttaatttaaccattttaaatatgattctctgggaattttttcttcaaartatagaatatgtgtgcattcgtttgctaggcttgctgcaacraagtaccacaaaccgggtggcttagacaacagaaatttattatctcatagatctggagactagaagttctagatcacattgttagagttggtttctttgactactgtgagaaactgtatgttccatgcctctcccctggcttctggtggtttgctggtaatctttgtcattctttggcttgtaggtgcatcacccggatctctgccttcatgttcacatggtgttctacctgtgtgcrtatctgtggccaaatttcccctttttataaggataccaggcatattggattagggttcctctctactccagtaggacctcatcttcactaattacatctkcaataaccctttccaaataaggtcacattctgaggaactagaggttagaatttcaaygtacgaaattttttgggggtgggtaaggcacacgattcaacccataacaatatgtttgtgagtaaatcagttagtgtgttagttattgtccttctcccacctcagaatytgagaaaatacagtttctttttccattccttaggatgtagttggagaaggaggaggatgatgatggtgattattttttggtcatggagcataatgtccccactttaaaaaacaacaaacaattgtaaggaagttaactgtcatatacctactgcccagcttaaaaaatgattaggtcatcttgtttaaacataactgccatcccatcatcacacctcagaagttgacagtttccttagttgtttttttttttttttcctttttcttttctttcttttttttttttkkgggggggggatagggtctttctctgttgcccaggctggagtgcagtggcatgatagtggctcatggcagcctcaacctcccaggctcaagggctcctcccgtatagctggggccacagggatgcatcaccacatccagctaatttttaaattttttctagagatgaggtctccctgtgttgccccacctaattttttttgttgttgttgtttttccattttttttttctcctgtttgtaaggatttaatcaaggtctgtatatagtttggttactatgtctcttaggtctcttttcstttatagattccccttgtgatttattgaagaaactgggtcatttgtcctgtagaattctcaaattttgattttgctgatgttatccccatagtttcattgaccatgttcatctgttctctgaatttccaaaaactggtagttaaatttaggtggttgatctaattcagattaaactctcagtattgcatgctttgatcaggaggcataatgtgtagtttgtgtgtgtgtgtgtgtgtgtgtgtgtgtgtgtgtgtgtgkgtgtttaagtgatgttagtggtcactgatcattgcctatgtcagcatttcactaccagggtaatttggcaatgtctggagatacactgattgtcacaggttgggggagggaatgctataggtaccttcaggagtaagagtcagcacagcacagccccctacagctaagcrttaataggcctaaaatgtcagtagcactgaggttgagaaactctggcctacttttataatttcatcaggtgtttgtgaaatggtcttattstaactgttatttcttctttctttgttagctggaattctttcataaagagaaactctttgatcagttagttacccaaggtatagttcatacagtaaaggcaggatgtatgtttgattctttcctagttttcaaaataatgaattagttycctagcatcttccagaattgaccaatgaactttgtgtgtgtgtgtttttttcttttttagtatattatgaacttatatgttttaacacatttgtgtttcatttcatcgcagttatttttattttatttttatttattcatttattgttttsaggcagggtcttactctgtcacccaagctgtagtgcagtggtatratctctgtctactgcagccttgacrtcccggcctccagcaatcctcccacctcaccctcttgagtagctgggaccacaggtacaccaycatgcccagctaatttttgtgtttctggtagagacggggttttgccgtgttcaccaggctggtcttcaactcctgagctcaaaagcaatccacctgcctctgcctcccaaagtgttgggatgataggcatgagccactgcacctagcagttatttttattgatgctcaatttttcccttcgttgaatgctggtgcagtgaatgctgggtgcatcttcatgttggtttctgagtccttttgacatgaccacatggtctggtgttgtacgaragagcaaaataaggaaactggtgttctatgcttatcttgtacattttccccacacttggaatcagccattcctccagggagtgcaggttcacagkctgggctctragagaattataaggtcaatgtggtcatcttttagtattaagtcagatattctaaattattatttacttcctacatttggcccaagagtctaaccagatattttgggaaagagagaaggaattaaataaataaatctcatggttagaactgaagtgataactatactttcacaaggaaatataacttataaaccatgcagaatagaaaattatttttgttcctttagatttctaaaggaatgaaataagctgtgrgaagaaactttaactggagcatcttaccagtgttattcatgttttaactctgcttcagtagtttttcaggtttattacaaacctgcagtagccaactgaaytaattatctctaaacagggatttagccagtggactaggcacactgaagctttgtgagaggggaaattgatattaacattttttccagcttgttttgagctcgatatattcactttttttttttttttttttttttmattgagacagactctcgcactgtcatctgggctggtgtgcagtggcacgatctctgcttgctgcaacctgtgcctcccgggttcaagcaattctcctgcctcatcctcctgagtagctaggattacaggcacacgccaccatgcctggctaattttttgtatttttagtagagatggggtttcactattttggccaggctggtctcaaactcctgacctcatgatccgcctgcctcagcctcccaaggtgctgggattacagacgtgagccaccatgcccagtcgatatattcacatttttaataggaataactgtatactaaaatctattttagtgcatgtttaagatttgaagatgtaatttgactcagtactttccacctacatttttttcttcattctgtgcctgctaagactattctaatactttattatagttaacccccgtgaaaagagctcccagagcttacagtgcatttgattgatgtaacatggactatttattattttctaaattattttgtttgtataaagcaatctgaagaggatgtaagtcagtttgattccaagtttacacgtcagacacctgtcgacagcccagatgactcaactctcagtgaaagtgccaatcaggtctttctggtaagtgaaagaatttccatgtagtcatgggaaattttagtgtgaggatgggctcttcaaagaaaattcagtttgcttgctttgcagttcatgtaggtaacctggcccacttttttttttttttttaaataagccatgcctttataacttattgatgcctacaaaatttattttcataatccaacattttattttagcaattagagtgggaatgtacaaatctttggaaagtatgattcccttttttttttaggccacagacttaaaatgatgtttggcttagcatctcaaccaaaaattagtcatagcagtcggggagaaaaacctcactgactacatgtattttattyctgaaacagctatagatttttggtactttttttttttttttttttgagacagggtctcaccttgtagcctaggctgggtgtagtgtagtggtgtgatcacagttcactgcagccttgacctcccaggctcaagtgatccacccatttcagccttgtgagtacctgtaccacaggtgtgtgccacatgcagctaattttttatttttttgtagagacagagtctcactattttactcctggactcaagctatcttcctgccttggcttcccaaagtgccaaaattataggcatgagccatcgttcctggccctatttttggtactcttaacataagtaggggatttttttttttttttttgagacggagtcttgctctgtcaccaggttggagtgcagtggcgcgatctcagctcactgcaacttctgcctcctgggttcgagtgattctcctgcctcagcctcccgagtagctgggactataggcgtgcgccaccacgcccagttaatttttgtatttttagtagagacagggtttcaccatgttggccaggatggtctcgatttctttttttttttttttttgagaaggagtctcgctctgtcgcccaggttggagtgcagtggcgcaatctcagctcactgcaagctccacctcccgggttcacaccatcctcctgcctcagcctcctgagtagctgggactacaggtgyccgccaccacgccaggctaattttttgtatttgtagtagagacggggtttcatcgtgttagccaggatagttttgatctcctgacctcatgatccgcccgccttggcctcccaaagtgctgggattacaggcgtaagccaccacgcccagtcgatggtctcgatttcttgacctcgtgatccacccgccttggcctcccaaagtgttgggaatacaggcatgagccaccgtgccaggccaagtaggggatttttttaacattaattgtgaatatttgacatcaaaacatattggttcatatgtaatagtgaattctcattgtagaaatgtctgtatagatttatagcttgtctcctcagaaaagtaaaggtttttgatgttggccaacagaaatgatggatttatatcagaagaccatgaatgcatactattttgctcaaatagcacatatgcttgttgattttattactgtacttaatatgtcacatgaacatctatctcattttgtatcctttttttttcttttgtcatttgtttttggactactctagggagaatagaatatggggaaaataattgtttgggagtgttttttccctgtttttgagttcactggatttgtcactaacttaattcttaagcttttcttccccacattgctcackatgtaatacaagtagtgttgtatcttatgggatgggaaataagctctaaagttagcatggagttggggcatggtggcttatggctataaccttgaggtcaggagttcaagaccagcctggctaacatggtgaaaccccatctctactaaaagtacaaaaattagccaggtgtggtggcatgcacctgtggtaccaactacttgggaggctgaggcaggagaatcacttgaacccgggaggcagaggttgcaggagccaagattgtgccactgcactccagcctgagcgatagagtgagtgagactccgtatcaaaaaaaaaaaaattaattaaaaaaattaagttagtatgggatgcaaaagttgtgtatagtacagtatggttttgagtaaacaacactgaatagtaataatcctataaattaatatagagcacataggcaaaatatagtcttacagtattacataagagataaaagatgagtgagtgcatgcatgtttttaaattcaagtttgatgtgtgcatgatcaaagttacggcatctctgttagtaaaatcttaggttcagttagggaagtgggcatgaatcactttaattttggcattttttttctctcatgtactacagatgtggaatttatacctttgatttaacatagagaccttttcctcaattggacattgcagaatttcaacttatgtgacagttttccccccacaaaatagaagcattttatttagctgccaagaaatccaaagttgtggtggtaaaagtgagmtattgaagctttcgttgccagttaaagtattgttgagcttttcacaattacttaaattggctaatgaatagagcaactcatttgttaggttgtagccagaattctctacataaagtggatctctttaaacattaataaaaaaaaataggtcaggtgcagtggctcacgcctgtaatcccagcactttgggagtctgaggtgggcggatcacaaggtcaggagttccagaccagcctggctaatatggtgaaaacccatctctactaaaaatacaaaaattagccaggcatgatggctgtagtcccagctactcgggaggctgaggcaggagaatcgcttgaacccgggaggaggaggttgtaatgagctgagatcacgcccctcactgcactccagcctgggcgacagagctagaatccatctcaaaaaaaaaaaaaaawtatatatatatatatatacayatatatatatatacacacatacatacacacacacatatagtgacatcccacttatctggataatgtggttctagcaacctcatttcaacaaatattttaattcctgttgtaagaccccatcacagaattagaggaaattcaaagatgattaaggcacagcctgtacctcttggtagttacagctttagtccaccagaacgtttgtaaaattattctctgaagttcacatataactgtcacaaatcatatgcacttcagaattgcacctcactctttgggacttcactcagagctttgctgagtcttatttattgtaacacataatgcttactcatagattttgataaatagaagataggtgaagatggttaaaagaatgaacattgacagctagagaaatgacagctggtagcctaatagtaagatccaagagagaactaaaatgaacaaaactgcatttttgcctattacaactgaaggtttttgaaatgttgatacttattcatcaagaaaacaccaaattctagctgggcagagatcacacgtgcctatatagtcacagctacttgaggggctgaggtgggagaatagcttgggtccaggagtttgaggctgcagtgagctatgttatcaccactgcactccagcctgggcaatatagggataccccatctcttaaaacaaaacaaaaaacgaattctgtccaatcattggcgtaaaaccagaaagatcacaagatctgactttgatgccaagtcagaaaattgtttttactttggtctgattataagaaactgttttagggtgataaacttaattgcttatatgcctgtggctagaaacactagaagtttctttacatttctcctagtatttaacatcttttttttttttttttttttaatttttgagatggagtcttactctgttgcccaggctagaatgcagtggtgcgatctctgctcactgcaacctccacctaccaggttcaagtgatcctcctgcctcagcctcccgagtagctgggattacaggcgtgcaccaccatgcatggtggtgtatttttgtatttttagtagagacggtgtttcaccacattggccaggctggtctttaactcctgacctcaggtggtctgcccgccttggcctcccaaagtgctgggatgacaggcgtgagcccccgtgcctgggcgtatttaacatcttcatatggrgcctgaattttcctgtttttttttctattcctgtcagtagggtagaattttgtttgctagcatatcaggctcaatggaattctgctttcttgaagtgtgtgcctcacgaaatggctggaaagaagttaacgggtctaaaaatgaggttgaggacgtgggagagtgtacacattggtggttttaggtgtgcatcattgtgtaggtatgtcagactgaacaaccccattctcttgagatacatgacaaaatgccattctgtagtccactgttactgtctttcagggttttacatatgtggctccatctgtacttgaaagtgtgaaagaaaagttttcctttgaaccaaaaatccgatcacctcgaagatttattggcagcccacgaacacctgtcaggtatttcacactcttattttcacttttttttgtttttaaacaacctacaagagtgtttgcttaagaagtttatgccaagttatataaatgaaagactgtcatactctctttggttgacataagcacagcatctatatcttacattgcaaaggactagtctgactaatctatgatgttatatggtttaccttccctcccaaaagtaagcagccatactggcaaatgtcctctttatccattcactcagcatttattgtgcaccaagagcaccagcactacatactgcatgttatgtgtgtgtatctatatagtactataatacaggaattgtccctgtcctgatgaagcttacaatttagtgggaaagtcacaatagacaaaggatatacaaaaatataattacaagtagtgcaaagtgctataatttaaaaggggaaaaaaagaatgtactggtagagagcagaggaaaaacaagggggcttctactcacagtgatcagagaaaggcctccctggtgtagtaacatctagcagtgaacggaaagagccagccctacaaaaataggaggtataagaatgttgcaggcagaagaacagcaaatgcaaaaaccctgagggaggagaaaagttgcccttttcctggaagtgaaagggaaatcagtgttcctggagtgtgtggtgagtgaggagaagggcagaggtttggaaaagtattttattttaaatgcaatagaaagctgttttgagcaggggagagtaaaatgatatatataatacgcatttaaatgtatatatatctcattgagggttttgggggtcaggtgtakaggtaaagagaccagttaggaaattctagcagttaatctaggtgggggagagatggttcaatttttgcctttgtgctaatccacgtgaaaataaaattaaatgaaaataaatgtcatgttaccccactccctttaaacgtaaaggaaatatgtcttgttgagatgacccttaagcaaatgaatgatagctcttccttgtcttaaagcccagtcaaattttctcctggggatttctggggaagaggtgcttcggccagcacagcaaatcctcagacacctgtggaatacccaatggaaacaagtggcatagagcagatggatgtgacaatgagtggggaagcatcggcaccacttccaatacgacagccgaactctgggccatacaaaaaacaagcttttcccatgatctccaaacggccagagcacctgcgtatgaatctatgacagagcaatgcttttaatgaatttaaggcaaaaaaggtggagagggagatgtgtgagcatcctgcaaggtgaaacaagactcaaaatgacagtttcagagagtcaatgtcattacatagaacacttcrgacacaggaaaaataaacgtggattttaaaaaatcaatcaatggtgcaraaaaaaacttaaagcaaaatagtattgctgaactcttaggcacatcaattaattgattcctcgcgacatcttctcaaccttatcaaggattttcatgttgatgactcgaaactgacagtattaagggtaggatgttgcttctgaatcactgttgagttctgattgtgttgaagaagggttatcctttcattaggcaaagtacaaaattgcctataatacttgcaactaaggacaaattagcatgcaagcttggtcaaactttttccagcaaaatggaagcaaagacaaaagaaacttaccaattgatgttttacgtgcaaacaacctgaatcttttttttatataaatatatatttttcaaatagatttttgattcagctcattatgaaaaacatcccaaactttaaaatgcgaaattattggttggtgtgaagaaagccagacaacttctgtttcttctcttggtgaaataataaaatgcaaatgaatcattgttaaccacagctgtggctcgtttgagggattggggtggacctggggtttattttcagtaacccagctgcaatacctgtctgtaatatgagaaaaaaaaaatgaatctatttaatcatttctacttgcagtactgctatgtgctaagcttaactggaagccttggaatgggcataagttgtatgtcctacatttcatcattgtcccgggcctgcattgcactggaaaaaaaaatcgccacctgttcttacaccagtatttggttcaagacaccaaatgtcttcagcccatggctgaagaacaacagaagagagtcaggataaaaaatacatactgtggtcggcaaggtgagggagatagggatatccaggggaagagggtgttgctgtggcccactctctgtctaatctctttacagcaaattggtaagattttcagttttacttctttctactgtttctgctgtctaccttccttatatttttttcctcaacagttttaaaaagaaaaaaaggtctatttttttttctcctatacttgggctacattttttgattgtaaaaatatttgatggccttttgatgaatgtcttccacagtaaagaaaacttagtggcttaatttaggaaacatgttaacaggacactatgtttttgaaattgtaacaaaatctacataaatgatttacaggttaaaagaataaaaataaaggtaactttacctttcttaaatatttcctgccttaaagagagcatttccatgactttagctggtgaaagggtttaatatctgcagagctttataaaaatatatttcagtgcatactggtataatagatgatcatgcagttgcagttgagttgtatcaccttttttgtttgtcttttataatgtcttcagtctgagtgtgcaaagtcaatttgtaatattttgcaaccctaggatttttttaaatagatgctgcttgctatgttttcaaacctttttgagccataggatccaagccataaaattctttatgcatgttgaattcagtcagaaaagagcaaggctttgctttttgaaattgcaactcaaatgagatgggatgaaatcctatgacagtaagcaaaaacagaaccatgaaaaatgattggamatacaccttttcaattgtggcaataattgaaagaatcgataaaagttcatctttggacagaaagcctttaaaaaaaaatcactccctcttccccctcctcccttattgcagcagcctactgagaactttgactgttgctggtaaattagaagctacaataataattaagggcagaaattatacttaaaaagtgcagatccttgttctttgacaatttgtgatgtctgaaaaaacagaacccgaaaagctatggtgatatgtacaggcattatttcagactgtaaatggcttgtgatactcttgatacttgttttcaaatatgtttactaactgtagtgttgactgcctgaccaaattccagtgaaacttatacaccaaaatattcttcctaggtcctatttgctagtaacatgagcactgtgattggctggctataaccaccccagttaaaccattttcataattagtagtgccagcaatagtggcaaacactgcaacttttctgcataaaaagcattaattgcacagctaccatccacacaaatacatagtttttctgacttcacatttattaagtgaaatttatttcccatgctgtggaaagtttattgagaacttgtttcataaatggatatccctactatgactgtgaaaacatgtcaagtgtcacattagtgtcacagacagaaagcacacacctatgcaatatggcttatctatatttatttgtaaaaatccaagcatagtttaaaatatgatgtcgatattactagtcttgagtttctaagagggttctttatgttataccaggtaagtgtataaaagagattaagtgcttttttttcatcacttgattattttctttaaaatcagctattacaggatatttttttattttatacatgctgttttttaattaaaatataatcactgaagtttactaatttgattttataaggtttgtagcattacagaataactaaactgggatttataaaccagctgtgattaacaatgtaaagtattaattattgaactttgaaccagatttttaggaaaattatgttctttttccccctttatggtcttaactaatttgaatccttcaagaaggatttttccatactattttttaagatagaagataatttgtgggcaggggtggaggatgcatgtatgatactccataaattcaacattctttactataggtaatgaatgattataaacaagatgcatcttagatagtattaatatactgagccttggattatatatttaatataggacctattttgaatattcagttaatcatatggttcctagcttacaagggctagatctaagattattcccatgagaaatgttgaatttatgaagaatagattttaaggctttgaaaatggttaatttctcaaaaacatcaatgtccaaacatctaccttttttcataggagtagacactagcaagctggacaaactatcacaaaagtatttgtcacacataacctgtggtctgttgctgattaatacagtactttttcttgtgtgattcttaacattatagcacaagtattatctcagtggattatccggaataacatctgaaagatgggttcatctatgtttgtgtttgctctttaaactattgtttctcctatcccaagttcgctttgcatctatcagtaaataaaattcttcagctgccttattaggagtgctatgagggtaacacctgttctgcttttcatcttgtatttagttgactgtattatttgatttcggattgaatgaatgtaaatagaaattaaatgcaaatttgaatgaacataaatagaagtgatttatttttttattatcttaaagataggaaggaattagtatacgtatcaggtgtataaatggtttaaatttattthaacatgtcagatgtgttcaagttgtcatataaataaactatgtatgtaaggaatgggttaaaagctgttctgctgagaaactgaagctatttaagtatataacaagttttagtattgatttttaagttagatgttacacatctttgattttcaagttatgtcagatagtagatatgaattgtttacttaaaaaaatacatgtaacaatctacgtgaaagctagcttcataaaaaactctaggaagaccttcttgtgctaacaatcaacaatctgttcagctacacttggtcagctacatttgataatttgatatgtatgcacaaaataacgtagtgaacaaatgtgttttaactaatgtytcaatatatctagtgtaagctgggtattttgcattaaccacttcttttctgtgaggtaattataccacacttgccaaggggatttctctacagaagctctcaaactgatcttaccttgctatacaacatagtagcctatcaatactggtaaaacaatcttttagaagccatgatctgaattcacagagtaaatgagtttctgaatctacattacctgtttttgaggtgaaggaatagagggatggaagaaatgcttccagttcatcagcatttttattggatggcatagctccattagattttctcccttttcaatttataggtaaactgcattccaaaaaaaaaccccaccatgcacctccttggttatgtaatcacattcattaagaaacagtgctgtctgaatagttacagagtaagcaaatgtattaaataggtattctaatagggctgaagtaaaatgctattcttgtatttgaacaggaagtcatcttggctatccttcacagccgaattgtaatcccacattgcttttctcacccatcctctgccgtatacctaaataatacaactattagcatcaccacaaagccatttaaataatatttgtagtgggtctcaaagtagataacagagtaaaatatactgtaattgaatatagttgtacttacaacctggtagtatttacctggagagaaaaaaatggtacaggcttcctaatgtttgtttgtcaatttggatggctgtacagtcatggaagtgccttctataaccagttggtcagtttgctaaactaaacaattcatttgctagtttagcttttgtcttatcagtacagcaaatctgttttctacctctgcttcctaagttctttctaccaccttttcctcgactacaaactgatagatgtactctaaacttggatataagcactagcagcccttcagacatgttttagatttcagattcctccttagaggtaacaaggggagaaagtgcttcattctcttttctagcaccctgcacaaatacctagaggcgaacaaaccacactatcaaaacctcatgaccacctctcagtgcgagcttcaatcttccaattgatggtgattcaagcataaaattccaaaacttttatggagaagactaattataagggcaattttttataagattttagggcatctgtcttgaaacttttttcttttaaatagagatgggatgttgcccaggctggtcttgaactcctgggttcaagcagtcctcctgcctctgcctcccaaagtgctgggattacaggtgtgagccaccatgcctggccatttgtcttgttttctatactattcaaatcatcaagtaagccagctgtttataatccacatgaattattttaatagttacttcgagatactccatggtactatacaaaaagcatgatcatgaacattaaagctgatggcaggaagaatttatgacgtccagagacaaaatgaatttaaatcatttattttcacttattactaatcttactacagagaataatacaatactataatgtatcatcctcagtaaattaatcttcacttagaaaatgttactgataaaatacaacatttagaattttcatttaaaaatacaaattttatgaaaatattaagaatttttaggatgggaattataaaagtcaatgctgaacaaaattctacttttagatagtatgtatcttaaaatattatgaaaaatattctttattctgaaaacaatgtcaggaaagaatacctgagttctctaaaaccactagttctaatttcaaattgctgttttggtaacataaagaaaacacatttacaatttaacactgcagttacctgtcaaataattagaatagaataaatgttgcatatacattaggttgaacattatatatattttaaaacacagggtggtttcatttaatcttttggtgaattggatcataagtcctacattctaaaaccatctggaaacatttttctggtagccctgaaaatccattctgatgccttatcagtagtcattatgaccaaatgacattagtattttgtggccttgatagtttatacaacttaatatatttgaaggtgtgatgaagtggctccatccttccatttgtttatatggtctgaaatcacagttctgcagagtggacatgttttctctctgttaaaccataaggtcatgcactcttcacaaaatatatgctgtaatggaattaagaattagatttgatatttgataatcattttaaatccatcacattgtagggaatgaaagggattctttttttttttttttgagatggagactgaagtcttgctctgtcacccaggccggagtgcaatggcaccatctcggctcactgcaacctccgcccccractggttcaagtgattctcctgcctcagcctcccaagttgccgggattacaggtgaccaccaccaccatgcccagctagtttttttatttttagtagagacagggtttcaccatgttggtcaggctggtcttgaactcctgacctcaggtgatccacccacctcagcctcccaaagttctgggattacaggcgtgagccactgtgtccagcctgaaagggattttgaagagcactaatcccctcattttacaattgtgaaaatggagaacgtatgagacattcaagaagacaaagagcagtatgattggtagagccactagtgttctggctgtaccatccatttaaccataaaagctatccttaggtgacacctttaagattaagtatgataactgcttaaggtctttgagttactagtaactgccataaagtataggaaagggccacaatccagtaacaaatgtcagtattgttctacatggctagtatccaattataaaatagcctgttttttaatcactttggtattcaatctgccagttgaattattttttccccttcatacgctcctctgcataaaaattatcagaacataagggacaaaacttagccaatccactagtatgtaccctgaatgctaccttccactaaacactagatttttttttttttgccttacagcaaacataaatttgacttttgcaagtcacagagaactgttgtatttaggtttttaaatttaaaaatgtaattacctgacaratgagaagaattggcttctgaaattcagcttgacatattgaacaaatatcatccacatctgaacactgtctcttgctggcagccactccataactctatgaagatagtaagttctgttcatctacaaatttctttctttcctgttcctcaaattacataagtaatgctgtacttctcaaatctccctggaaccaggcatttgaaaaacttcccaaaggatacaaacatctcaaagctgagccatatacagaaccacctcttgagtgcaccaaaatgaaatcattaaataatacataataggattttgaaagattgttagatctactagctttacaaaggatgatagtgcttcaaattcaacataactggcttaagagactaagcaatctgaaatgtaactattataaaatctatagccmtgtattatttgacccaggactgccaaattgagcttattacctgcagcagtggttcataaagtcaatccagccagaggttggctggttgaatgtaactcatgtggaaagcttgctttaaaaatagatttctctgttccacacaatatcaattcactaggaccagacatattgggatgtgacccagtaatctattatttgaaaggtctccaagtgagtgcaatatgaagaagacttagggaccactgaagaattttctgccactaggtctaaaaattattcgaaattataaaaagcatttagtgctaaacataaaaaagttttacggagaaactgcaactgtaaatgtcgctttggtagaataactactgtcaaaactaactgaacaaaaatgcaattatttgaattttcttctcttctaatgtcctaataacaagttactcgtctctaagattttaacctcctcaccagattcagaacttagtcattaactagatgtgatgtcaataaccctcagtgaaatttggagaaatcaaaatgttacaaatgaaacctgctttctgtagaaatgatggggaagaggtaactaaagagatgtaagaacacccaagtcagtcacrgtcatgagggtaaagcatgacttaacatagctgaagttatctaaacttcttgtactaaaacgtctcaggctaacaacatcaaaatcaaagtaaaactcaaaggataaagatattaaaaattgaggttttttgaaactggtaataaagatttcagaaataagtcaggatactgttagatgatcttggtgtcaatttcccttcagtaaggtgtcatttagcaaagtacatttgcagataattatgctgacaagcttttaagacgttactcatctggcatcttggagactccctctccagatagtaactgccatttccctggtaaaggagacttgaacaaatccaagtattgatgactgatatcctctctgtagtttgtctcagagaaagaatatcagggtattttcttgagagtatttcggcacaaatcttacaagaccaattatagtaaaatggttgatgctcacataatcatcagttgaactgacttggacaaagctgaactctctgaattttattatgtcttgtctagagaaacaagcttgcataggatgtagcaaagtttgtttctacattgctaactctatcttagggaaaaggccctggccagttagtctcgtttactttgtagacataattctttttttatttttacggtatattattcggttggcattcttttaagtcagtctccttgggccctgatgaaatgactgcaaaattgagaatcaaaccctgaagtctgctgaccacacataggtactaggaacctttcaggctactaagtggtaaattagggttctctatgacatcctttcactgcaatttgcaacatcaatagaatcacacaataatgttataaatgacaccagagactcaattaattgttaaatttcatgccatgaacgtatttatgcacatataattgagcaatggggaaatctgctccagtaagaaaactgcaagagacatgatttttggcagtgagctttctaaacaataaattacaatggaaggattttcacaggtgaataaggagttaataggaacaaacaaagcccccatttgtggattaaaaaagaggaacacaatttcataagattgttaagggtttacaagccttaaaaatgtccagtggattgaagaggcaagagacaagttcaaatatataagcactgcaacaattagcaggtggttgtcaatgtgtgattcaagaatctgatcacagagataaaactcctaaattattatagccccaagtgccaaagtactagaaaataatcaaagtaaaagaaaaggatcatctatttatgaaatccattcttgtaaaactgctgaactaaaaaaatttttgcagtgaagaaaggtgaaggtgtttttcttaactgataaaaagtacttactggttgtgtaaaaaatattcgtaaaacctgtctgaaagttctcagatgcccaaaaaattccaaaagctgaaaagagaaataagagatcatttattaattcaaacagtcctatttgctaaacccaaaaaccaaagctgaaatcccataacatcaaatcctcatattaacttaatgttcattatatgtcacatctaatcattttgtgctgagtattttattcaatttatagatttgagccatctcagcaagctgaagtacatttaaacacctagagtaacaatttgatcaagacaaatacaactatgtcaaagtcaaagcaattttatctgattcacctgtttttaacatttagattttaaagtttcataaagtgattattaggttgaggggygcaggcatggagagaacaggacaagatactctactagtttaagaattatgtgtatgacaatgttactgttgaggatgggtatgttctattccacttgttttccctacttagataatccacgctatgtgaaggtcgactccccttccctccagtgaaacctgaggaccgctggattaagatagtctatttccgtttctccatttctaaacaaatatagaacctgctattacttcaaactagtgatatgaagataaactataaaactgttaaaagaggaaaacagtagtatgtatcagtaatcattaatgtgaatcatgcagtgacaagatttgtaatgttacctacttttaatatgaggtagagtaaagccagcagtatcccaagactccatctagttacgttaccaaactccccatagcttataaggtagcgaaaccaaactggtatgggaacaaaagttcggtagtattgacacaattcttctaaaagcatataccagtaaccctaaaaaataagaagaaaacaaatagagctacccaaactacttaactacatagcacaaacaatattagactgagaacactgagtatattatacaataatataaataactataaaattaatcttcataatgattatgactgaacctcaagctggttctcacatattacagtcactgagtggcctgctttgaaagaatttctaggttggacgcagtggctcccagcactttgggatgggcagatcacctgaggtcaggagttcgagaccagctggccaacatggtgaaaccccgtctctactaaaaatacaaaaattaactgggtgtggtggtgggcacctgtaatcccagctactcaggaggctgaggcaggagaactgcctgaacccaggaggcggaggttgcagtgagccaagatcacaccactgcactccagcctgggcaacagagcgagagacaatctcaaaacaaaacaaaaccaaaaaaaaagatacaatgagaatgttttatgtatactgcaagtaaaacctatgtgagtatgtttttgctgattataagaatttaaaagtttttagtgcatatgggaaaccactgaataattgtacatagtcaactgtcaattgataatgccctggagaacagaagtacacatctaaatagtttcccacatatgatgtggggactgattttaaaattattctgaagcaaatataattctgattttatccaaataggttaataatcaggttcaagtgcctgaacaaatggttgctaagctgaaataatacagataattaagctagttagcaaactgaaaaactgcaaaaggaggattcatttaaacaaagactaaatagcattaatgtgattcgataacatcactccaataaagcataagtgagtttcttaccttagatttaaaaggcatgatgaaagaaggcaccaataaaataaggcattttaagcccatgaaaaagaatttcagaatgaagtctgtaattccaacaatccaaaatacttcccagaagctcaaatggtccaaagtaggatttaaaaaaattaagctaccaaaagaaaaacatcaaaatttatcagagcaacatacaaagataaagtattaataaagggttttaatttgctacaaatattttattttgatatgtaaaaaatatgagtttggcaggatgtcagagttcacaataatggaatggaggatcattttgcttaaagagactttttaaacctgtttggattttagatcttcccttcatagaataaggaaaaagtcttcacggtttgtcatagttgacacctttctagcctgtaaatgaaaaaaactcatcaataccagacatctgctgtgtttttcttaaccaattccaatcaggattccatctcttcctttcaatgaattgcttgtcaagatcatcaactccctctgtatggctaaatttcaaggtcactctctttttccatcttccctccctgaataattttctttctagacttttaacacaacacttttctatttctcatatttcactgctggtttcttcttagtctcctttgctgtttctcttctaattgtggtcatgtccagtactgggctctctatctacactctctttcctgggttagttttgtccagtcctgtggtttttaaatatcaaccatatgctcctgataccaaaatttattgccttaacctctaccctgagttcatgacatatatttggaaccactttcttatcaattctmcttagcctctcaaacttaacatgttcaaaacaaaattattgatttttctcctcaaaatcagttccttcctcaacccaatgaaatgacaccaccatccagccagctgcttagactaaaaacccagaggtcattcttgcttctctccacccacctatccaatccagtccatctgagggatactggctccacctccaaactatatcccagatttgcccatctctccaactccagtgaaaccaggtcttctaatattctaataaaagctgaaaattcagaatactcccatttgacatggagacttatcagctactgtcatttagtaagtgttcttactttcagaaacaamgaccaataataacaacctaatggtactttaaaaatacgaaatatgtaaacaaaaactcaggtatcaaaaaattaaatatttattgagcatctgttatgtgccaaggcactggggatacaaaatctgagtaagtcacttaaagctctcacttatgaggctgggtgcagtggctcacacctgtaatcccagcactttaggaggtggaggcaggcagatcacgaggtcaggaggtctgaccaacatggtgaaactccgtctctattaaaaatacaaaaatttgccaggcgtggtggcgtgtgcctgtaatcccagctactcaggaggcttagacgggagaattgcttgaacctgagaggcaaaggttgcagtgagccaagatcaagacactgcactccaggctgggcgagagagtgagactccgtctcaaaaagaaaaaaaaaaaaaaagctctcgcttatgaaaggagaaagttaaaaactgaactgaactgaatacaataagtactatgtgaagtaagatacaaagtgcyatgaaatatatgattacattaaaaatgtaattgtgtatttggacctctaattacctgtaataaagtgactgagaatgaaaggtgtaatataaaagaacagaagatcctgctaagaataccagtaaccaagcacactgaatctttgaggacctttcctgaaagataaacaattttataatgttactttgattttgccagaattttaaatatcattaaactgttttactttaatgactattaacttagaatatttttytaaatcttaatatagaatatgttaaactgtacataatcatcacagttactgttttatacwactttagtgaccaaacagaactcttatattaaacaaatgtttaaaatacaagtttcttcactgtatgaaaaacattacctatgtttcaaagaagccaagtcttctctcaaaaaaaaaaaaaaaaaaaagaaaattaaattaaattaaaaaaaaaaaaaagaagccaggtcttctacaagctgacataaaggacccacccaggacgggggcagtggctcacacttgtaatcccagcactttgggaggccaaggtcggcggatcgcttgaggtcaggagtttgtgaccagcctgcccaacatggtgaaacctgtctctactaaaaaaagtacaaaagttagccaggcgccgtggcacgtgcctgtaatcccagctactcaggaggctgaggcacgagaatcacttgaacccaggaggcagaggttgcagtgagccaagatcacgccactgcactccagcccgggtgacagagcaaaacaccgtctcagaaaaaaaatggacccacccacaaaagaaaatttcaaaatgcattttaaccttgactcacttgtcaaggtttatattttttaaattctcagattataagaatttaataaattaatgttttaatctcacttttttaatatatggggtctcgacacattgctcagaattcctaggctcaagcattcttcccaactcagcctcccaagtagttgtaatctccctttttttttttttacttttttgagactgggtctcactctttcacccagactggagtgcagtggcatgatcacaactcactgcagccccaaccacctggggtcaggcaatcctcccacctcagcctcccagatagcagagattacaggcacgtgccaccacgcccagctaattttttgtattttttgtagagatggggttttgccatgttgcccaggctcgtcttcaattcctgggctcaagcaatctgcccatctcagcctcccaaagtgctgagattacaggcatgagccactgtgccttgcctgtaatctcacttttaaagtcaagtttaatgaagttttactaattttaaatcattaagatttttctagtttgataggtttaactataaatttccaggtcagaatgcatgatactttacacagacatagccatttaaagttgccttaaggtgaaattttagaaactcatcctctttttcccaatgatttatatgaygggctcgtgtaacttatgttatggaaaaattccttgggtttcattttctctctttttttttttgagatggagtctcactctgtcgccaggctggagtgcagtggcacaatcttggctcactgcaacctctgcctcccgggttcaagcaattctcctgcctcagcctcccaagtagctgggactacaggcaagcgccaccacgcccagctaatttttgtgtttttagtagacatggggtttcaccacattggccaggctggtctcaaacttctgacctcaggtgatctgcctgcctgggcctcccagagtgttgggatgacaggcgtgagcccctgtgcctggcccaggtctttttttttttttttttttttgagatggagtctcgttctgtagcccacgctggagtgcagtggtgcgatctcagctcactgcaacctccacctcccaggttcaagtgattctcctgcctcagcctcccgagtagctgggaatacaggcacatgccaccacacctagctaattttttgtatttttagtagagacagggtttcaccgtgttagccaggatggtctcaatctcctgacctcatgatctgcccgcctcggcctcccaaagtgctgggattacaggtgtgagccaccatgcccagccactaaaagtttttcatgatgatggtcttacttactatggtcaaagtaactgatacaacatgaagggacttgccaaatcagatcagataccgtgttctaactcttttaatcctttttactactttaacagtaaccaatttttttttcttacaaagaaggtaaggtgaaggaattcagcattaggagagataatttattccaggatttagataacaaatttaacataacgtggatgttacaatatatcctattacttcctatttctttcaagttatttcctatttctctcaaaattatttctctaaaatctatggagagaaacagttaataattttttagttgcttgttatacttactcttagaaaaacctgatttacaatgcttttgtttgcatacataaaagttgttagcagcccaattccaagagaaattcctgttagaaaataagttccagttaattgaaagaaaaaaaaatcaaagaggattatataagctaacaatgacacamattaaaaataaacatatacaataataaaagctcacagaaaataagtaactggatgcattaagtagattaccaataatgaaagaaaattaactgaatttaggaatgaaaacaagtcaatgttttattatgtcctacctgttatatgctgcataacaagtttgacgctcagaatcaaaatatatggaagacttttttgcagccacttgaagagatagcggaattctgagaaggagctactaccatgatctccagattctgcggcagtatcatcagtcagccttgcttcactgtgggagtgaccccgtaagcgactgtgtacacatccatgggcacagctatggacacctgaccttatatttctggagcttgcattttctgcacattctttaggtatggagtttatctggatatgaacatctccagaatgagggcaagaaccctctcctgtcaatcttgtgtggacacactgaggggttgaggcatcctcactgcttccagttcctggaggactgtgcagttggctacgattggcttgcatggcccttaaatactttttctctgacccagatgtctttgcttcaggcctctgtctcctaaaaaatcaaataaaagatattctaagtaaacaggcagttaaataccagcagtatattcctcactgggtatcctttattcaccaaaggagtagcaaataatcacaacagatgaattttcaggttatttatcactggactcctcccttctcccttaatgccaaggctctgctgccctacacaaatgatcttttagggaacatttgcaccaaaaaaaaaaaagttgagctgcaaatgcttccagttctctaatggcagaaggcatccgcaaaacagtcatgaagtatgggtacccagcagatgttaatgagcaccagtcctcactgggtactctggtacatttacttttcccaaatggtgcagtttcatctctgatgtagattctacatcaaagaagtttcataaggaagagtgagccagtattttttaatggttggaaatgttaggaaaaaaaacaacattaaatcttaatgccttattatcatcataggtaactaataataaacactgcacttaggtgacctacaaattagattttctgctcaagcagctttcccaaagctcataaagtttccaataattaatggtgccaccaakaatattacctccccgcgcaaaagaatgttacctaaatacatttaaagcatagatactttggagagtcaccacgtaattgctaggtaactctttagtctgaataagcagttacacagtccgcccaataaaatgccaccgtcggtggtgtgtgtattacggagggaggggtgtgaggaaagaggactctagcagagaaagatctctctaataaatgatccagtgtggacctcctagaaacagaagaacagagtcggaatcccagctgacaaaacgcagaggctatcccacactgccgtgcttttcccgtttgtctaggaggaggctagagttaacgtcagggaatgttctgtgtcattctatttcactcccaggactgaacagtggtgcagtcaccgtgtctggcggtttgggtttcagtgcttttcactaaaggctttcaccgaggccccgacgccacgggtgttatttcgtcaaaactgaagagcgacgttggacagcaggctttcagtgtcttttctataaataacatagaaccctcccactttccttcatgcacagacaagaaagaggagaaaaaagggaagaaaattcaacacaactcttccggaatctccgagggcagagttctccacccacgtccgagcctcgagtgcctattctccccagagccccctgcgccgcggcccctcgccgcctcctcctctgcccgcttcccccaggcctaacctctcatgaccagaagcggacggaggtgtcgggagcgacagcaagaacagcggcatacaccgcctccagcccttcagtcggggccatcaaccgcaaaccccgcaagctcttctctcagcccggcggcaacggcggcggcgcgcgcgctccccggacgttctcacgcgcgcgcgcgcgccctgccccggctccacctcctagccccgcccccgcaccgcgccgagtggagagctcacggctgccggggtgttttggcagcgagaacaagcgagctgcgcctgagaacggccttcaggcctggcgctaaataataagtcgttgttatgtgttatgtatttatgtggcatccaccacacgcctccgagatcctgggcgttttgaggttaaaaatgttcaggcttggagaacctacccctggaggagtgttagggtttccgggctcggatgtccgcgagcttgacgcctgacctagttgtgtctgtctgggcggtgacgtttggtctgagctgacctttcctcacaatcgtgaatttgggctgtgaggatcaggccttgtcagaacccgagatgagaggagagaggtgcggagagtctgcgtggggtggaagtagaagttagagttgaaaaacctgtcttgcgtggggtatagaggaccctactgccctcaaaataattatgttaatctaaaactgttctaaaattaaaaggttattaagaaaacgaagtttaggtcgggcgcagtggctcacacctgtaatcccagtattttgggaggccgaggcgggcgggtcacttgagctcaggaggtagagaccagcctggccaacatggtgaaacccgtctctattaaaactacaaaaattagccgggggcgttggctcacacttgtaatccccgctacagatactcgggaagctgaggcatacgagaatcacttgaacccgggaggtggagtttgtagtgagccaagatcgtgccactgcactccagcctgggcaacagagtgagtgagactcggtctcaaaaaataaataaataaaataaattctgttaatctaaaactgttctaaaattaaaaggtcattaagaaaacgaagctgaggaggggagtggtagctcacacctgtaatcccagcactttgggaggccaaggcgggtggatcacaaggtcaagagatcgtggccacatcctggccaatatggtgaaaccccgtctctactaaaaatacaaaaattagccgggtgtggtggtgcgtgcctgtaatctcagctactcgggaagctgaggcaggagaatcgcttgaacccgggaggcggaggttgcagtgagccgggattagccactgcactccagcctggcaacagagcgacactccgtctaaaaaaaaaaaggtttaggcctggcgtggtggctcacccctgtaatcccagcgctttggaaggccgaggcgggaggatcacttgaggtcaggagtttgagaccagcctggccaacatggcgaaaccctgtctctactaaaaatacaaaaatcacccgggcttggtggcgggcgcctgtaatcccagctactcgggaggctgaggcaggagaatcccttgaacccaggtggcggaggttgcagtgagctgaaatcgtgccactgcactccagcctgggcggcagaaggagacccccacctcaaaaaaaaacacattggctttctttttttgttgggggtgggggtaggggtggtcggcggtggtagaaggcatacttaagtctctctgtgcttactaatttaaatctttctgacagatttctggttcagtaagggtgagagccaggctccagactatagtgaattttccgaggagatatgtgtaagtattctaacatttcaactatgtcgtggatatttttaaacttcaaaatgtgtgaacatttaggaaacaggaaaaaaaacagaatataacataattcagccacagccacaatgcagcaccaatatgtattagtacactgataattttagtacatttggtacatttgtaaatttagaataccaaatgtagtgtttaaattctcatcttggccagatactacggttcattcctataatcctagcactttgggaggctgaggtgaaaaggtcgcttgagcccaagagatcgagagcagactggacaacatagagagaccctgtctctagaaaaaaatgttaaaattagctgggcactgtggcaagggcctgtagtcccagctactcaggaggctgaggtgggagaatcccttgagccagggagattaaggctgcaatgagccgttattgctccagtctgggaacagagtgagaccctgtctcaaaaaaaaaaaaaaaaaattctccttttgacatactcataacactgcaggtatattagtccatatttaaagtttattagtgcacttggagctgcatttcacccaagtaacttgactgaaaagtgacatatttgaagaaagaaaggactgaattgatgagaagatttgacttggtgacaggctattatctgataaattttctttccactggcatctggactgttggaaatagacattttaattttaattggttaattcaaaaagcattttccaagtacttactgagtgttaagaataatactagatgttggagagagagacataataaagagtctcgggccaggcatgatggctcacacctgtaatctcagcactttgggaggccacagcaggtagatcacttgaggtcagcagttcaagaccaacctggccaacatggtgaaactccatttctgctaaaaatataaaaattagggccaagcacaatggctcacgcctgtaatcccagcactttgggagggtgaggcaggcggatcacctgaggtcaggagttcaagaccaggctggccaacatggtggaaccccgtctctactaaaaatacaaaaattatcgaggtatggtggcacgcgcctgtaatgcagttactcaggaggctgaggcaggagaattgcttcaacctgaggcagaggttgcagtgagccaatatcatgccactgcactccatcctgggcaacagagcaagactccatctcagaaaaaaaagaaaaagaaaagttgccatctcatggtgatggaaatgtttagacctgcaaacaaataattacagtattttggagaaaacactataattgaaggttctgtgagatgcaatggaagcaaaaggtagaagcatttaactttgtcagggaagaaatcttttattaaatttgtgatatttaagatgaaatctttttttttctttcttcttttgatagagttttgctctgttgcccagggtggagtacagtggcgcaatcttggctcactgcaacctctgcctcctgggttcaagtgattctagtgcctcagcctcctggatgaaatcttaagaataagttgatatttaccaggacagaagcagtaacagggcaatgcagatagaaacattatatggaaaatggtggtattgaaataccatggtcttttaaagagtgtttttcgtatttggaagagtagagtggatagagtagtaagagataagtcaggtaagtatgagctagaaaatgagtttgtgggcctcacttagtttattctaatggccaaaaggaagctattgagttttaagcaacagaattgtgtgactggatttgtgtttttcagaaaattcatatgctgatagtagcagtgcaagctccattaggagactattataagtagttcaggaacaagatgaggtcttgaacttgtcagtgaagtgggattcaagaagaagaatgagattggagaggttatgaaatagaatcagtagggttaagtgtcctagattgttgcagttaagctcgtcaccccctctactacccacacaaatttttcacacctaccaatgtccatatgcttgggtagtctcctcgcagactgatttaagtgatttgctttgatccttgggacaatagcaattgtaatgttaatagagacttgaaaaattcttctccattgggattcacactcttactgttggcaaccctttgccacaatttgattaaattaaggctggcctcctagaagrtgagaccactttgagagtgtccctagctctaccagccttcccagttgtctcagcattctctgttgaagccccaaacatatgtgtgaagccatcctagagtgagccagtctacacatagaattataggaaatacagattcttttctttctttttgtttgagatggagtctcgctctgtcacccaggctggagcgcagtggcatgatctcagctcactgcaacctctgcctcctgggttcaagctattctcctgcctcagtctcccaagtagctgggactataggcacctgccaccatgcccggctaatttttgtattttagtagagacggggtttcaccatgttggccaggctggtctcgaactcctgcccttgtgatctgcccgccttggcctcccaaagtgctgggattacaggcatgagccagcgcacccggcctatagattattttcttttaagcctctaggtgtggggcagttggtttcataacaagattaactgatagcctaactgaccaagcatatggggcagataagagaaatagtctaggacaaatcttcattttttagcatggatggatggataaatcaatattaggaagctatgttagaataagtaaactggtggcattaccagatgaatagggaatttttttgaaagaccaagtttggagagatatcartaaatttggcttggaaacactgagtcttaggagttcctgggaaacacacaggtgaagatatccagttggcgatttgatataaggatctggagacagaaaatttgaagtaaaagctgtggctttgaataacattgcccattcctcatttatgcattttcagagcctttttttgtagattctttgtagacagtgttgtctacaaatagaaacagcttcttcctttctgatgcctatgccttttatttcttgctttattgtattaactgtaactgccaatgtgatgttatgaataaattaaataggaatggtgacagtagacatctgtgccgtgctcctgattttaaggggaatacattcagccttttaccattaagtatgtcagttgtaagttttgctcatttgtttgtttcctttttcctttttttttttttttttttttgagacagagtctcactctgttgcccaggctggagtgcagttgtgtcatctcagctcactgcaacctttgcccccagggttctagcgattctcctgcctcagcctcctgagtagctgggattacaggygcctgccaccacgcccggctaatttttttgtgtttttaatagagatggggtttctccatgttggccaggctggtctcgaactcctgacctcaggtgatccacctgccttggcctcccaaagtgctgggattacaggtgtgagccaccacgcctggcctgtttgtttcttttttttgagctggagtcttgctctgtcgcccaggctagaagtgcattggtgtgatctcggctcactgcaatttccacctcccagtttcaagcaattctccagcctcagcccccccagtagctgggattacaggtgtcggcaaccacacctggctaattttgtatttttagtagagatggggtttcaccatgttggccaggctggtctcgaactcctgagttcaggtgatctgctgccttggcttcccaaagtgctggaattacaagtgtgagccaccgtgcttggcctctagttttttttgtaggtgtcatctatcaggtcaagtaaattaattcccttctactcctagtctgctaagaatttttatcatgagtggatactgaattttgacaaatctttttctgcctttattaaaaaatcatacaatttttcttatttagcctgttgatatggtgaaattttcttttgtcttttttttttttttggatgtagagtctccctctgttgcccaggctggagtgcagtggtacgatcttagctcactgcaacctctgcctcctaggttcaagcaattctcatgcctcagcctcccgagtagctgggattacaggcatgcaccaccatgcccggctaatttttatatttttagaaatttatcaattgatttttttgtttgtttgtttgtttgagacagagtcttgctctatcctccaggctggagtgcagtggcatgatctcagctcaccacaacctccatctcccaggctcaagcaattctcctgcctcagcctcccgagtagctgggattacaggtgtgtgccaccatgcctggctaatttttgtatttttagtagagacagggtttcaccatgttggccaggctggtctcgaacttctgacctctggtaatgtacccgccttggcctcccaaagtgctgggattacaggcgtgagycactatgcccagcctatcaattgatttttaaatgttaagccagccttgcagttcaaggataaactccacggagttgtagtgtattaccctttttatatattgcgttcattttactaatattttgtgggagatttttgcatctctgtttatgggagatactggttttcttacaatgtctttaactgttgttgatgtcaggataatgctggcctgaactggaaaatgtttcctgtttgtagaagagattgtgttgaattgatatcatttcttacttaaatgtttggtagaatttgccagtgaggccatctggcctagaattttttttttttttttttatggaaaggttgtaaactacaaatttcagtttctttaatcactgtagaattattcaggttatatatttcttcttaagtgagcttgaaggaattggcataaagttattcataatattctcttattagccgtttmacatctgtaggttctgtattgacattagcactttcattgctggtattggtaatctatgtcatctttgtttttttcttggtcagtatcactaaaagtttatctattttattggtattttcaatacaatttggtttcatttattttagttttatttactttctaatataagcatatcatttaatttgattaatttattttgagacagagtcttgctctatcacccaggctggagtgcagtggtgcagtctgggaatcactgcagccttgaactcccaagctcaagtgatcctccctcctcagcctcccaagtttccgggactacatgtgcatgctgccacacccagctgagttctaaaattttttgtacagatgggatgtcactatgttgcccaggctggtcttgaactcctgtgctcaagtgatcctcccaccttgatctcccaaagtgctgggattacaggcatgagtcaccacactcaaccaagcatataattttatatatgatcctcccacctcggcctctcaaagtgccaaagtgctgggattacagacatgagctactgtgcctggcacctttgatattttctattagtataggtctgctgccaatgaattatcttagtttttcttcatttgagaatatctttagttttcccttcattaatgaaggatattttcattgatatctaattcygggtagacagtttgttttagcaatttaaagatattccacaccgggcacggtggctcacacctgtaaccccagaattttgggaggccgaggtgggtggaccacttgaggtcaagagttctagacaagcctggccaacatggtgaaaccccatctctactaaaaataagaaaattaggtgagcatggtagcatgcgcctgtaatcccagctactctggaggcagaggtgggagaattgcttgaacccaggatgcaatgagctgatatcgtgctactgcacttcagcctgggcgacagaacgagactccgtctcaatttaaaaaaaaaaaaagatattccactgtttctactcctcaaggtttctaataagaaatccacagtcactcaaatcaatgtatgtacaatacataccttgtaatgtatttttttctgcaggtatctctctctgtcatagtatctgaataatacccacccaaagatgtcaagttttaattcctgaaactcataaatattattttatttggaaaaagggtctttgctgatgtaattaaggattttgagaggagtcggttaccttggatttttcaggtgggtcctgaataccatcccaagtgtccttataagagagaggcaaaagaggcaatagagacacagaaaagaaagccatgtgaagatggagcagagagatatatggccacaagccaaggaatgctgacagctgccagaagctggaagaaggcaaggaatggactctcccctacagcctccagaggcaatgcagccctgccaacactttgattttagacttctggcctatagaactgagaaagaataaatttctgttcttttcagctactaagtttgtgatcacttggtgcagcatttacaggaaacaaatacacctctccttctagaactccaattatgtgaacattagaccatctaatattgccccacatgttcctgaggctctctgttcattttctttttaatctatttttctctgttcttcagattggacaattgctctcttttttgtttgtttgtttttttgagatggagtttcgctcttgtcgcccaggttggagtgcaacggcgcaatcttggctcattgcaacctccgcctcccgggttcaagtgattctcctgcctcagcctcctgagtagctggtattacaggcacccaccaccatgcccagctaatttttgtatttttagtagagacagggtttctttttttttttttttggcagtttttacttttatttaaacagaaaacatgcacacgagctgtctactcattttctttgctgcgcagcctggcattggggttggtgactttgatggccagttgggcagctctttccacgatggctttgcggttcttggaggaaacatggtgagtgatctcggcacagtaagatttgttgcacatcagcagcacttccagctccttgacgttgtggaccaggaacttccggaagccactgggcaacatgtgctttgtttttatttttatatttttgcaacggagtcttactttgtgacccaggctggagtgcagtggtgtgattttggctcactgcaacctctgcctcctgggttcaagtgattttcctgactcagcttcccaagtagctgggattacaggcatgtgccaccactcctggctaagttttgcatttttagtagagacggggttttgctgtgttggtcagactggtctcaactcctaatgtcaggtgttctgcccgactctgtctcccaaagtgctaggattacaggcatgagccactgcacccggcctggctttgtttattactgtatctaatgcctaatatagttcttggcatatactaagtggccaataaatatttatggaataaacgaatgaatggacacttttcaaacctcatcctgcttgacatttttgcagcattctacgctataggttgttcccacctcctggaatctttcttccctaaactttcatattctactgatttccccacttctgtaggctttctttacaggcaagctgctacttctttatgaatcttacagcttcagatattgctgtgaaaatggggacacctatatagtcacccacatacgcacaagtacaaacttaagagaataataaatgctcagtcaccatttcctcatccgagaagggagtggatacagtcatcccttagtatctctagggaattggttccaggaccccatgtggacaccaaaatccatggatgctccggtcccttatatacaatgatgcagtatttgcatataatctatgcatacccatatgctttaaatcatcttagattacttaaaatatttaatacaaagcaattgttatataaatagtaattatactattattacttagggaataataaggaaaaaaagtctatacatgtttagttcagacacaaccatccttttatccactcccccagtttttttttttttttttgaggtggattctcactctgtcacaaggctggagtgcagtggcatgatctcagctcagtacaacttctgcctcccaggttcaagtgactgtcctgcctcagcctcccgagtagctgagattacaggtgtgtgccaccatgcccagctagtttttgtatttttagtagagactgggtttcaccatattggccaggctggtctcgaactcctgacctcaagtgatctgcccacctcggcctcccaaagtgagccacgatgcctggcctgcccctaaatattttcagtccttggttggctgaatccacagatgcagaaaccacagatgtggaacccatggatacaaagcactatttgtggccaggtgcggtgactcacacctgtaatcccaacactttgggaggccatggtgggaggattggttgagctcaggagtttgagagtggtctgggcaacatggtaaaagcccatctctactaaaaatacaaaaattagccgggcatggtggcacacacctgtggtcccagctactcaggaggctgaggcatgagaatcacttgaatccaggaggcaaaggttgcagtgagcccatattgcatcactgcacttcatcctgggcaacagagtgagaccctgtctcaaacaaaacaaaacaccaacaggctgagcacgggggctcacacctgtaatcccaacactttgggaggccgaggcaggtggattacttgagcccaggagtttgagaccagcctggccaacacggcaaaaccccatctctactaaaactacaaaaattagccgggtgtggtgacgcaagcctgtaatcccagctacttgggaggctgaggcagaagaattgcttaaacctgggaggtggagattgcagtgagccgagatcacgccactgcacttcagcctgggtgacagagtgagactccatctcaaaaaaaaaaaagggtgggggggaggatgagaaaactgggagatgatggatatgtaccattatcttgatagttgttttacgcaaatgtcaaaactcatcaaagtgtatacattaaatatgtgtaggttatcacacgtcaattatatatcaggaaagcaatttttaaatatcttcatttctgtgaagacaattcttttatcactactaggaatgtttcatggggtcaaggaggtcatagaaacaaatagaatggaagggtggtagaatagaaagggtgctaatgtacatcaatgaaacttcaatatgaaatatataggtccaaaatgctactcaagaaaaaaaacattatggcaatcacctgtttaagcttcctgattagttctcgaagttgagcttccacacgaaatgcagaaaataagcacctccaatgaatccagtgtttttggcaccatgaagctggagctccactgcaaaacaaaaaactggtatctttaaaatatcttctctaagtaaaagacaatctaaaattctcatttctattacaaaagtggaaacccataaacaactgtcagttccttcaggagacctgtccaagtactaaaaaagaattttaggaaacttgaaaaaaacatttaaattaatgaatgtgcccctgactaaattaaaaaataatttgtaaatggatttctttacttatatatgcaataacaaatatccaatcattttttaatctaggctacctatatagaagcaaaattctacaaggtcattttcagtaaaggtttgaggaggaaacaagagaatcaatgttatataataaatgcctactaagcaatagtcatctgacatagataatttcactgaaattcaaaataccttgaagtcaatatcatcttcactgaacgttagtgtcacaagccacatcataagtacgtattggaactacacatcaaattgacatttttcaggacaaaggactaccttacataccttgatttgcattgttcaaagatgacagctaaagttgcaaagtcattaaatcctccagctttagctgccaattctcgatgtctctgttctgcttccttctggtactctggatcaactaaaagaattggagaggcaattcagttatactttgcattaagtgcctacaatcactttgctttcagaaactcattaaaatctgcctcatcctctggggtgaagtaaggtagaactatattaactcttcttaacttctcttaggaagctctatttctcccacaattcctttttttcttttcatatcactttggagattttacctgaatagcaacatcacttctcccaatctatttgccttttaaaaatagtatttgtaatttactttttaaattagttttgttataagagtaatccatgcttacagaaaaaaaaatgtaatggtataaaagaatatcatgtaaaagttcaatgttccccagtcacactacccataaaccaatcctcaaggcaaagtactgttcattatttagtgtgtgtccttccaggtaatttctatgtatatataagcatatgtacataatgtttcatttttctataaatggaacatataatctgaaaatttgtttatttaataacaactccatatcagtacacataaaattattctctctcaaaaacagcaatatagggccaggtgtggtagctcacacctgtaatcccagcaatttcaaaggccaaggcaagtggatcaattgagcccaggaggtcaagacaagcctaggcaacaaagcaagatcctgtctctacaaaaaatacaaaaattagccaggcatggtgatgcatgcctgtagtcccagctactcaggaggctgaggtgggaagatcgcttgagcccaggaggtttgtttttttttttgagacggagtctcgctctatcgcccagacgagtgtagtgggcgatctcggctcactgcaagctccgcctcccgggttcacaccattctcctgcctcagcctcccgagtagctgggactacaggcgcccgccaccgcgcccggctaattttttgtatttttagtagagacggggtttcacatgttagccaggatggtctcgatctcctgaccttgtgatctgcccgtctcggcctcccaaagtgctgggattacaggcataagccaccgtgcccggcccaagcccaggaggttgaggctacagtgagccgtgatcgcatcactgcactttggcctgggcaacagagtgaaaccttgtctaaagaaaaaaacaatgatatggtattccccaggagtatggggaacataacacaatttaaccagttcttatttatccaattcccaattatgggcaattagacatgatctccatatatgcagaactgacctactacgaacattttcttttttaatgtaatattgaagtataatatgcatacagaaaattacacaggacgtaagtgtgtagctcatataatattcacaaacacaacataccaatgtacccagatcaacaaacagtatcaccagcatctcaacagcccccttttatgccctccttcgagtaactacccattcccttccacaagaataactatatcctgacttctaatcctacagatgggttttgcccatttttaacctttgtataaatgaatcgtatagtatgtacttgatgtgtctgttttctcttgctcaacattacgtttttgagatttatctgttaattacttcgataccacttcccctgatcccattcaggactcatgtgctctctgattgcccaaattccccatacagcactttatccagggctaatctttcagagtgccattttttcaaaactgcatagggatcctttccttcaatctaacacgtcacatcacaattcctattccctatacctatcacagctagatctagcagaggcacaatgttgcctgaatccagggagcagcatttactatagaatacgatgtgaaactgcaaagcagcagttcctgttactaggaggaaagtaatttgattaaagaaaacactgatgaaggtataaagtcttctatcccatgctttaagtagcttccaactatgttacctaggtagcaactgaatgaagcagctagagacaaaaaaaaaaaaaagaatacgatttatctcagaccatacaaacatacaaatgaccctggtaaggaaaagatataaatgattattaatctccatttcttgaactgctccgggagactaattttgttttttgttttgttttttgagacagtctcgctctgctgcccaggctggagtgcagtggtgcaatcttggctcactgcaacatccacctcccaagttcaagtgactctcctgtctcagccttccaagtagctgggactacaggcacacaccaccacacccaaataatttttacattttttagtagagatgg

SEQ ID NO: 96751 - DNA, 16082 bp, Homo sapiens
tagtgcccttgcctggcaaaggagtcattccagaaggagccagtcaggttgagttcctgcaccccaaaggtgaggggagtcaggtcctcccactggtccttgtacgccacagagaagttttgggcccagaacaggatccggggagcggtgtcattgtaactcacaggaggatggatcacaggtgatactggctgtttttgtagcagctggcgacctagccctccggccaccacggctacatcacgggccacctgcagaaacacccaaccagccttctttcagcagccctgggagagtgtcacacttgaacccaattgtcgtgccctccttcccctcccaacaggacaccctgtccactatctcaaagtcccatcagccagaggagacctttcctccaggaagccttccctgatgccccctaaaccctgatgacattcctagtccctcaaacttagggtcatttagacttagtgtccaagtctgccacccacaagcctcacaggacgagatggaaagctgcccctggaatggggaggcaggacttgagtgctcatcctagccctgcccccagagtcagccactccaaatagtcacaccacaggggttctgtgcctcatgcttcccctatgctgggcctcctgggcagcctacctgtggcatacactccccacctccaagcagactcaccacactgcctctccctgcacgccccagagcccctgctggaagggcacataccctggaagggcggaccgctgtgagggccgctgtgtatgggacatcttcggacttgagtgtgctcaggacctgcccgatgacctcatctgagggtcaacaaggagagcagagactcaggtcaccaggcaccctgcataaagaaacactccccactgtctgctttagaaaccttctagaccatctgaaagtggtgtgtttactttccactgaggatccttaggagcagctacttctcatcccacccccattcccagcctcccccagagacaactgtggcttcagtcatcgattccctaatgccaagccctacctatgtgacataagaaaatacatatcaatacagaaaactccacatccacccatgaaaggttcacgactgcctttccatggggagtgactgtcctttattgcaaatagatgagtccccagaattgtttttccaaatgtctgcagtcttattaaacccataactctaggattcacgctgcctgcacagaaactggctccacagcctccagcacagagagccgcccccctctgccaagtggggtctggctggacagggtcttctgtcaggtggtccctggctggtcctgggagccagcatttccctgctccactgccagctgccccgagaagcaggcgggccaccctgggagtgaggaggccgaggaactgcaggccagctctctctgtggcccccacccaagggctagatgaggacgtgcatcctccctgattctactcaccgttgcctgtgaggacttccctgggtgccatcagaccagagctatggaagacaaacagagcgccagagtcctcaggcggcctggacctgcactgcccactacccttccccgaccccagcttctcctccccactagccccacgcaccaagcctgcacactcttacctcagtgccccctcctggaagcccatcccaccccgaggcttctcagtcacactcaagtcctggccacctgctctgtgacaagggcctggctaggtgagaaggctccccacccgcagggctcacatctgcctcatctctggaggcccagctcagtgctaggcaccaactcctgagtcacagaagaggccctcccctcctcttctggccacacagggcaccttctggaagggctgtgagggggtggggagtactggcatctttagccaaacggtgccaccacatgccatagcccagggccttgctgctctctgggccccgaggctggtggctgggccatgcgggcagtacctggctgtgtagggcaggcgaatgagcagcagagcagggaggctggcattgagcttcagctcccgcagggtggccaggtccacatgcaaggggctggccccgagcttctcctgcaggtaagtggtcagagtgctgactgcataccagtcgacggcaggaagcaccagtgaggagggggccaggtccagggcattctggggacaggggagaggcaaaaggtgagttagccaggggccagtgggcctggcccagccccccacacctctctggcagctctcctctggcaagccatacccataaaggctcaccaagaaaatggcccacaccccagcccctgacattcaggccccaggcctttctaccccaaagccagcgtctctgctccctaagagtatgaggtggcttttgttgttgttgttgtttttgggggggatggttgacccagaagagactcagacccaagtaaccctgatatgaggtcagagtacagttcttatgctgggagaaggagcacagaatgtcccccatggcccctggctgggagaggactctcacctctaggttagaaaaggcgctgtcctgcttgtttccaaacacaccgccatatgctgtgaaatcctcaatgctcagctattagggaaataggggagacatctgaggaggtttggcaagtgatgggggccaaggcaggggacagccaccttccccgtgcattctcagggccagcaaagtctcactgagagtcaggttcagtatggtggagcacaactgtgtgttggtgggggtggggtgggagactcacctcttccctccagcactctcagggcagggtgagaagacatggaaggcagtcatggggtggggagatctgcaggcagctgacttgtggtaactcaggagtaggagtcagccgccttgcccaccctacagacaagaggaactggggagggaacagggaagctgcggggagggggtggggcagccaagagcatttgtggcaggcctcccagccagagaaaaggagagtcggctatgtccagtctggacgggaccctccccccacctgcttttggcggaaggggagaggtgaggatctcagaacatgctggaggaagcatcgagcattgaagtcttttgagctcttaggaccacagtggccccgaccccatccctttttctccacaacctacagatgtcctttgtccttttgctcctaccctccactcccatccccagcttcctctggcccttcccagttaggccctgaggagattttaatcagcttccctaacctgtttggtatacacactcgcccagcctcccctcccttgtgggcaggaccttgctgctgtttggccaccggggttctcagtcggaaagcccaggaactgctggtgggtcctgtgggctttctttaattgagaaatcacaccactccctgctccacgttacccaaggctttctcacacatttcgaactgcaactgaccttccccctcatggcctacaaggtcctacttcatcgcctagccacctgcaaaccatctcctacatctcctacccctttctctcactcactgtgctccagccacaccagctcttccttgagctggccaagagcacacctcgcccaggaccctcgcatttgctgttccaggaatgtccttccccaaacggctccctccctccattaagatcgctgctcatatatcacctcctcaatgaggcctggcctgaccacccttatctaaaatagcatcccagtcactctgtccccttagcctgcttccttccctaaaggccgtaacactgacatcatatcctataccgacttagtatttactggccaccctcacaagaatgtcagcttcctgagggtgggggcttgggttcttctgctcactgccatatccccaacacttcacaatacctggcacatagtaggctttccatattgggcaaatgaatgaatgggtgaatgccctaagactgggggatcctggctagatgttttatgtggattataagaattccccctcacaggccgggcgcggtggctcacgcctgtaatcccagcagtttgggaggctgaggtgggtggatcacgaggtcaggagttcaagaccagcctggccaacatggtgaaaccccatctctactaaaaatacaaaaaaatacaaaaattagctgggtgtagtggcgggcgccctgtaatcctagctactcgggaggctgaggcagagaactgcttgaacccgggaggcggagggtgcagtgagctgagctgacattgcaccactgcattccagcctgggcaacagagcgagactccgtctcaaaaaaaaaaaaaaaaaagatttcccactcacagccctctgatataggtggtgtcttcattttacagatgtagaaactgtcattcacaaagattatttcatgcctccaatggctggttacatggtagaactaggactcagttcctatttgactatattatttaccacctcctgaaaagacttcaggccaccaccatctgcccacacagcaaccaagggagactacaagggcaatgagccatacaggccaccaacaagggagggcctagcagagacttgctatcttagagtcatctcatggtctccacgcctgcttttggggcaaagatcctggatgggaaggaaaacagcatgcgggttatgagctccaattgggagggaggattggcagactcaggctggaaccaaagtggtatctatcaactgtagtgaaacattgtatctcgacaaaccttactttccttggcagtgaaaccaagataatgacatcagtgtagcaagtgcctacaaagcactaaacaggtgagcattttccaattatcattattatgatcatcacagctagaattacaactctgccacccattagctgtatgagcttggacaagtcacttaacctccagcctcagtcttctcatctataaacaaacagggacgataatccccacccaccatattggactaagtcagatatccaaagtgcttggtactcagtaggtacctggcctctggtccgtcgcttcctccaatcaagttggtgccatttccgaggctgtcgccatgcccactgaagcgtttactacaggccttcccatgagacgacccacacctccctacagttgggacaaggtcactgaagcttcccttggggaatgggcgtcagtgtcatggggggagggggcctggctgcctcccgatgaccgggggagagtgggctggggcgggcgcaccttgtcctgcaggaacagcagcacattcctgggacccagctccagggcgggatctaagtaggtagagagctgcaagtcgctggtgatgtggccttcatgagtgtcggccgcaggagcccacaagtccctggcagggcacagaagaggtgctgtcagacgggggcgcatgtggactggagctctgtcgccggcagattcgctgcgagcccccgagcaaggaacagtccacctccgggcctcaccacccctcgcctaggacagcgccggagtcgggcgagggcgcctcagccgccacagcgcatcccaccccggcccgctcaccggtcactcgaccacagcaccagcgggacctgctgctccgccgctgccgccgccgccgccgccgccaacgacaaaaacaccggcagccacggcatgcgccagagcgcctgggcgcaccgcggccccatccgcactcgagccgtcgccatggccgccatcatagcctcagcctccactgcctcagcggcctcgacagccgcagatcaggtgaccgttgcccccgcccgagccccgcctcgcacctccattggccccagcgcgggccgaccggcagggccgcaggtaattggaccaagtgcatgccactcgcggccactccttctcactggttggctgtacgtgtctccaggcgctcacgctccgagtgggaaaggggatggggcccagctagaccgactaggacgagacaagagggacagggaggcttcgcggaaccctacgcccacccgacgcgttcgcccgtccgtttttatttttatttttattttggtttttttgttgttgttctcttcttttgtcttttttttttctttagagacggggtctagctatgttggccaggctggtctcgagtccccgggctcaagcgatcctcccgcctcagcctccggaaaagtgggactacaggcgcgcatcgccgcacccggccaatccctgttttaatccttttccttaaaattgcaaaagtggtgtctttttcctgcagatggaccctccctgatacaggtgagaggagactgtaatcccttagaacgaggagtgaagcgggctcaggatagcatctaggggaacacccagcacttacattgggcaggaggagaagggtccagaaaagagatcggacaaggagcaatcaaagaggaaggagaaaacccagagcgaagcgtggcatcaaagacaccctaacgggccgggcgctgtggctcacgcctgtaatcccagcactttgggagcccgaggcgggcgaatcatgaggtcaagagatcgagaccatcctgcacaacatggtgaaaccccatctctactgaaaatacaaaaattagctgggcatggtggtgcacacctgtagtcccagttacacgggaggctgaggcaggagaatcacttgaacccgcgaggcggaggttgcagtgggccgagatcgcgccactgcactccatcctgggcgacagagtgagagtccatctcaaaaaaaaaaaaaaaaaaagattgtagtcatgattgtcacatgtgattcagactaggactaggatagtggcagttgagctggagagaggaagtgggtctgacaatacagtcaaagaagattgtagcttttgggtctctctgagttggggactgggagacgaggtcacttgggggctcactgagtttcgggtgcttagggaaacccccaagtggccatttccaggccttaactagctgaggagagaggttttcactggagcttcactgtatcccaggagaatccagcaaacttaaaaaggaaagcatgtctattatgtttctgttacttttgttacatagtttcaaggcaaatacttcctctggaatgcggaaggcaatcttgcctccgccaggactctgttgctgagctgcttccatgcttagggaagaaacccacctgtggctgcttttattcttccctgcattgctaggggtccctggagtgatggccctggaggcttcctgaagcacctgctatgggccaggcacctggactctgccccggaagttgacagtttggtctagaggacatgcaggacagcaggtcatgatacagggtcatgaatattccaaaggttgagacatgggactgggagggatgtaaggagaggggcaccgatgaagctgctcccaccaggaggtgatatctaaactgaaccaatcaccaaatgttgacagcaccaatgagcaccttctgtctggggacttcatctttagggtaaaagcattttgttcattgaaatcctggctgggcgtggtggctcacgcctgtaatcccaacactgggaggctgaggcgggcagataacctgaggtcaagagtttgagaccagcctagcaaacatggcaaaaccccgtctctactaaaaatacaaaaattagctgggcgtggtggcgggcacctgtagtcccagctactcaggaggctgagacaggacaattgcttgaacctgggaggcggaggttgcagtgagccgagatcgtgccattgcactccagcctgagcaacaagagcgaaactccatctcaaaaaaaagaaaaaaaaaaagggccgggcactttggctcatgcctgtaatcccagcactttgggaggccgaggcgggcggatcacgaggtcaggagatcaagaccatcctggctaacacggtgaaaccccatctctactaaaaatatgaaaaattagccaggcgtggtggcgggcgcctgtagtcccagctactcgggaggctgaggcaggagaatggcgtgaacccgggagatggggcttgcagtgagccgagatcgtgccactgcactccagcctgggcgacagagcaagactctgtctcaaaaaaaaaaaaaaaaagcacttctatggtgaaacgtaacccaaaaaagaaaagaagtaggccaggcgcattgctcacgcctgtaatcccagcactttgggaggccaaggcgggcggatcacctgagggcaggagttcgagaccagcctggccaacatggtgaaaccccgtctctattaaaaatacaagataattagccgggcatggtggcatgcgcctgtaatcccagctactcgggaggctgaggcaggagaatcgcttgaacccaggaggcagaggttgcagtgaccagagatcatgccattgtactccatccagcctgggtgacagagcgaaactctgtctcaaaaaaaaaaaaaaaaaaaaaaacccacaaaataaagatgtacagtgtaatgcttatcaaagcagacagttccatggcatcacccaggtcaagaatttgaatatcattgccctgaaagcccctctcatacccttactatcacttcccaatgtgaccatgaacttgattcttttgctaatcactttggtctttatagtttgaccagttaagcatgcattcctaaaaatgatgggatgtgttgttttggctgttttgaggctttaaataaaggaaattattcagtataatatttttccctcctccactcttttttttttttttttttttggagacagagtttggctcttgttgcccaggctggagtgcaatagcgccatctcgggtcactgcaaccttcggattcaagcaattctcctgcctcagcctcccgagtagctgggattacaggcatgtgccaccacgcccggctaattttttgtatttagtagagacgggatttcaccatgttggtcaggctggtcttgaactcctaacctcaggtgacccacccaccttggcctcccaaagtgctgagattacaggtgtgagtcaccgcactcagccttctcctccactctgaagggaagtattattttgtgtctagattctttgctcaacattggcagattaattcaagtggctgcatgtaacaatgttgctgcatagtattcccctggatgaatacgtcaccattgattgtgtccttcaactgttgacatttggttggtttcccatttgggctgttatggctaatgctgctgtgaacaattatgtatacgtctttctttttcttctttttttttttttttttgagacggagtctcgctctgtcacctaggctggagtgcagtggcgtgatctcagctcactgcaagctccgccttccgggttcacgccagtctcctgcctcagccccctgagtagctgggactacaggtgcccacccccatgcccagctaattttttgtatttttagtagagacggggtttcactgtgttagccaggatggtctctatctcctgacctcaagatctgcccgcctcggcctgagtgcttggattatgggcgtgagccactgcgcccagccgatgtatgtgtcttttgttaaacatagatgttcatttcaataggtatataactaggtggggaattgctaggtcatagagtatatgcactgggttgagtagtgtccccataaaagtcattgcagacagaatcaagttaaggtgaggttatactgcataagggtgacccctagttcaatcaatgcatggtgtttttaaaggaggagaaaaagagacagacacagggaggagagcacwgcacgcagctgaaggcagagattggaatgacacctctgcaagccaaggaacacggagcattgctgggaaccaccggaagamgccagaagacaggcctggagctggctttccctcacagccccagaaggaacccaccctggtgccaccttgatttcggacttctggccttcagaactgggagagaataaatttctgttgctttaaacttcccagtctctggcactttgttactgcagccacaggaaacccataccatgcacactctgccttttgtgtttcctcttctgtgaaatgccttttttttttttttttttgagacggaatttcgctcttgttgtccaggctggagtgcaatggcacaatcttggctcactgaagcctctgcttcccgggtttcagtgattctcccgcctcagcctcctgagtagctgggattacaggcacccaccaacatgcccagctaatttttttttttttttttgtagagatgggggtttcaccatgttgtccaggctggtctcaaactcctggcctcaggtgatccgctcacctcggcctcccaaagtgctgggattacaggtgtgagccaccacgcccggccttaaccacttttaactgtacagttcagtggcattaagtacgttcacactgttgtacagtcatcaccaccatccatcttcagaactcttttcatcttcccaaactaaagctctgtccccattatacaatttctcattcccccatcctcccaggccctggaaaccaaccttctactttttgactctggatctgaagccggtaagtacatcatataagtggaatcatataatatgcagccttttgtttccggcttattgcagttaacataatgtttcttgaaaatcctttgagagtatccatttgatagcatgtatcaaaatattcctttttctttcttttatttttaatttttttttttttttgagacggagtctcgctctgttgcccaggctggagtgcagtggcacgatctcggctcactgtaagctccacctcctgggtttacgccattatcctgcctcagcctccagctgggactacaggcacctgccaccacgcctggctaattttttttttttttttttttgtatttttagtagagatggggtttcaccatgttagccaggatggtctcgatctcctgaccttgtgatctgcctgcctcggcctcccaaagtgctggattacaggcatgagccactgtgcctggtgtgtttttttgtttgtttatttgtttgtttgttttttgagatgaagtctccctctatcgcccaggctggagtccagtggcacgatctcagctcattgcaacctctgcctcttgggttcaagtgattctcctgcctcagcctcctgagtagctgggattacaggcgtgcgccatcacgccagctaattttttgggggttttttgtttgtttttgagacggagtctcactctgtcgaccaggctggagtgcagtggtgtgatcttggctcactgcaagctccgcctcccgggttcacgccattctcctgcctcagcctccagagtagctgggactacaggcacccgccaccacgcctggctaatttttttgtatttttagtagagacggggtttcaccatgttagccaggatggtctcgatctcctgacctcgtgatctgcctgcctcggcctcccaaagtgcttggattacaggtgtgagccaccaggcccagccttttttttttctttttttgagacggagtttcgctgctgtttcccaggctggagtgcaatggctcgatctcggctcaccgcaacctccgcctcccaggttcaagcgattcttctgcctcagccttcccaagtagctgggattacaggcatgcgctaccatgccctgctaattttgtattttcagtagagacggggtttctccatgttggtcaggctggtctcaaactcctgacctcaggtgatctgcctgcctcggcctcctaaagtgttgggattacaggtgtgagccactgcgactggcctaatttttgtattttagtagagatggggtttcaccatgttggccaggttggtctcgaactcctgacttcaaatgatccgcccaccttggcttcctaaagtgttgggattacaggcgtgagccatggtgcccagctgcttctatctatatttaattacaagtgtttgttttttcccaggtaatttttttccctttttggtcatttttttaaaaaccttttattttgaaataattaggcaccaacactgctgaaagacctggttgtctgaatcttctcttgttgctggctcatctttggtggttctatattttctttctttccacgtttctgttatagtatttttaatactgtgtctacgccaccaccctggatttgcctttgctcccacccaggacccccagctccatctgggcaaccccaatcctacctcctgatcacagcgtgcactgctcatggctggctacttgccgggctcttcagagctcctctcccacctatgatgcagcccaggtaggatccaattgattctccacacttgggtctctctgaagtgtggccccaatctacctggctagctttgggttttgaagcaagttcattagcctcactccacctccttggcaaaatgagattaatccctatttctgcaatgttgttacagggattacagacaataactgaagccttaagtgactggtgcagaagaggttgatgcccatctgctcaagtgtgctccatgtccccagggcactaagggttcagcctttctgtccagcagtcacttcccattttcacccctacagagaggccagagacattttacaacaagccaacacatatgctttatggttctgtttcaaaaacatgaaaacccaggccctaggattcaagtgatgttgagaggcagaaaggatggagaagttgttggcgccagcatgggggcaagcagccagacctcaggccctcactctaggctccacgtggctgggcttgacttctggccaagggctgcttttcccgcctgcggcccacctgaggccagaccttgcctgaggaaagggcctgtggtgggggggaagctcaggcagaaggaagacgtggccaacggccatccctgaggaggtagtgagcagctcctggttcggcaagggcggtgggtaggagccaggccgaggagtcttagggtcccctctccacagctctggtgggccccctgctcccctagccaactggttgctcacctgccttctatgctccctcctgaagccagcccctgggagagaacatctgaaggcaagaaggaaagagagccctgcctaagcttcttcctccctgcttggccaagtgggagaagcagctgaggtcctttgtgtaactgaggaagcacggaggagctggaatgcctaccagctcggagagggcacttgagagggtctatgaacaaatctgtctaaaagccacgtttgagctaaaagcatcagtccatccctcagccccagctctgtgcgggccaagaatccagaaggcagcaagcaaggcctatctcccaggctggaggtggttgtggagctgctctgcctgagtcttcagatgctggaattcctcttgaatgaagtccgtcagggctttccgcatctccacctgagggaaaggaccagggatggcctgcacccctcgggaagcttggccaaggtgccctgggagggtgccctgggagggtgacgggatggagagggtggaggcaccctgctggaagccagcagcagggggtccggggacagctacgggggacccaggaggaaactcacagccgacttgttctccgcccggagccgctcgagtacaggcagggcactgaagggcttcccgatcagcacagtgattttctgtggggtggccgccaagagtgatgaggagcagtaggagtgcccacagccccagcccaagcaacccgggagccagaagctaagccccggccctgctgtgccacacactccccaggggccactcttcctctaaaacaaggtcctggtcctgggtcctgtgctgtagatgacctgtcctgtcctgaccccacagcccacctctgccccagcctgacttcctctgctctcattttaatgtctcggtgccaggaagtccctgtctatgttccactctgtcccctgctgtagcctcatgctcagctcctcctgcagctggcctccatagtgctgagtgggagacacggagcagacagcagacaggcagacagccgaaggtcagcagtccccacccacctgtccaaagcgggggaagtagggcggactgttaggaaggacgtcattcattcctgcagcacagtggacagaaggccagacgtggggtggagcagggcagcctgggaccagagggagtcccaggccccccaccccagatgccatctctctgtccccgtccccaggctcaccgacatgccacaggggcaggatgatggggttgagatgacactcagcaatcaggcgcccgattcctgcccaggggggaggtagaaatgttagcataagctgggccctgagccaagcttctgtgccagcctctggccactgccacccccgacatcctccagttcaattcagctcccttgggcaagcccctgcgagaggcaggcctagtctcagcacctgtccccttcctggcgctacaaacacgcccatctacccccatacaagccagcccgagggggcgggagccaggggcccacagggccatctctgggccgggaggatggctgtggccagagaccagcagcccttaccccacttgaaacgcaggaattcggaactcatgttcactttccctggtgagagagcacagaggcgaggcttgggagcccatcccgctcatactgggggggctcgacccagtcagccctgctgaccttctgggaagatatgcacccagtccccatggttgagcttctccaaaatgaagtccatccccttctggtagacgccatctcctgcaaggaaaaggcctctccctatcagtaaccattctcgggggcgtggggtgacaggttagcttaccctcaacactctccaaacctcaatgaaacaggcccttctccctggggcccatgtgttggggactatccccctcagtccctgcttgctgggaaagccccagcagattagggacttcccatcccccactgcgccatccacagacgccctccaatgaccgtctccagggcctgcatggcacttgggcacgctgtggggcttccttcctaatatcttctaaacccctatgtgccaggcagcatcagctcaagtcatctcctaccgagattctgacctggcaattcctccatctacctatgacccccatcttcagtggctcaccagctgggccgcttcagccacatactcctgcacactctcaaagatccccaggtcagcgcaccacctgccctccctccccagccaggccctggctgccagccgaccgctctcggagcctcatgcgttcctttctctttgaaggtgccactcctgggctgatcctactatgtgccagctgctagagaaaccaagtgcatttgtgatttccaacctcgcttaggccccagattctgggcaacaaccctttgctgggatctcagccgcttgtcacagccactcctcacagggcacctgcctgaggcctcagcctccaccattcctcccccctgctgaccccttcttctcagggcaccccgggaaactagaccctcccttatagggaggtctcttgggaaagggagaacattcatttgaacacacatcaagagcttgggaaaaactcaaacttgctagactgaaaaacagtggagtcaaactgctcctggtctagcaactttccacattggagataaccctgagaccatggcactggacccaagagaaggaaatgcaaacctccttccttctgaagccaatgttggctgctgcgtgctggctggaagcctggggatgcttggagacagtaagtacacagtaaggatctcatcaaccttggtgatggaaaagtaatcacatggcagacaaaagaggaaagaggtggagaggttgaaggaatggggtatagcagatatcctcatcttataaagtggggagtaaagaagccctatcacagagcgagagac

SEQ ID NO: 96752 - DNA, 13190 bp, Homo sapiens
taattgcctttggccaaaaaataatttttatctcaaagaggcatatcttggggtggcaccttctggtttccttcacatacttcatatgatatacatacttcatcgtgcatatcattaaacacaatgaaatggacacatcatgagcataccattccttgagttccaatgtatgcatacccagtgcaacctaaatcccaagcaagatacaaagcactgactgaccgtggcggctcatgcctgtaatcccagcactttgggaggctgaggtgcccaggagtttgagaccagcctggacaacatggtgagaccccatctctacaaaaaaacacattttttaattagctgggtgtggtggcatgcacctgtggtcacagctactccagaggctgaggcagaaggatcacttgagcccaggaggtggaggctgcagtaagctgtgtttgtgacactgcactccagcctgggcgacagagagagaccatgtctcaaaacaaaaagcaaaaagcattgcacagagagcaagcattgctctgatttttttccaccataggttaattttgcctcttctaggacttctgtaaattatacaaaatgtactctttggataaggctttgttcacactgtatgcttttttaaacattttatgagataattataaattcacatgttgttataagaggtcacggagattgcataaatcctttaccatttcccccagtgttaaaattgtgcataaggacagtataataccataaacaggaaatatatattgacacaatccagtgacttcattcagattttaccagttacagatactcatttgtgtgtgtgatttagtttttttattttatttttattttttgagacagggtctcgctctatcacccaggctggagtgcagtggcacaatctcggcttactgcaaactccacctcccaggttcacgccgttctccttcctcagcctcccgagtagctgggactacaggcgcccgccaccacggccggctaattttttgtatttttagtagagacggggtttcaccgtgttagccaggatggtcttgatctcctgacatcgtgatccgcgcgccttggcctcccaaagtgctgggattacaggcgtgagccaccatacccggccatgtgtgatttagttctatgcaatattatcacctgtgtcaattcctctgaacactacagtcaagatatagagtagttccatcacaggaattcctcatgctacccttctacagccaaaccacctcactttctaccctcaccaccatcaacccccatgaaaccactcgtctggtctccgtctccttttttccccctccatcttaattgaggtataattgagttaaaatccatctctttaattttgtcatttcaagaatattatatacatgaatcatacagcagcaacaacaacaaaaaagccttttttgagatggagtttcactcttgttgcccacgctggagtgcaatagcacaatctcagctcactgtaacccctgtctcccaggttcaagcgatcctcctgcctcagcctcccgtgtagctgggattacaggcgcccgccaccacgcctggctaattttttgtatttttagtagatacgaggtttcaccatgttggtcaggcaggtttcaaatcctgacctcaggtgatccacccacctgagcctcccaaagtgctgggagtacaggtgtgagccaccgtgcctagcttttttttttttttttttttgagacggaggctgtcgcccaggctggagtgcagtggcacgatctcggctcactgcaagctccgcctcccagattcaggccattctcctgccttagcctcctgagtagctgggactacaggcgcctgccaccatgccggctaattttttttgtatttttagtagagacaggggtttcaccatgttagccaggatggtctcgagctcctaaccttgtgatccgcccgcctcggcctcccgagtgctgggattacaggcgtgagccaccgcacacggcctttattattattattattttttaaaaagacagagtcttgattgctctgtttcccaggctggtctcaaactcctaggctcaagcaatcctgcctcagcctcctgagtagctggcactacaggaatgtgtcattgcacccagctgttactgactttttgatgagaagtttttaattttgatgacaatttatctaagttttcttttatgattattgctttctgtgtcctaagaaacctttgcttttcttgaagtcgagagattctcctattttttttttttttaaatagacacagggtttcaccatattgttcaggctggtcttcaactcctgagcttaagcaatctgcccaccttggcgtcccaaagtgctgagataacaggcatgagccaccgtgcccggcctctatattttcttctaaaagctttgtattttagcttttacatttaggcttatgaaattgctcttttagtagtctctttttcccccctaaaaaataagatggctacgtgtgtgtgttggttgttgttgttttaacagggtccaatcgtgttgcccaggctgcagtgtggttgtacaatcacggctcactgcagcctccacctcccaggcccacgtgatcctcccacctcagccgcctgagtagctgggaccacaggtgtgcactaccatacctaatttttttgtttgtttgagacagggtctcgctctgttgcttaggcggagtgcagtggtgagatcacggcttactgcagccttgaccttctgggctcagactaggcaccaaaatcacatagacttgattcatccaatgaacaataaatatgatgcacctaccacaccccaggtgctgttacagatgctggagatatagccacaaataagacaagattcttgcacaccatggagtctgtacactagtgtgtgatgactagttttatatgtcagctgggatggtgtttttggatgaaattaacatttaaatcacttaactctgagtaagcagattgccctccattatgtgtgtgagcctcatccagtcagctaaaggcctgaatagaaagaaaagaacagcttccccgagtaagagtgatttcccaacagactgcctttggactggaactgcaccatcatgccaaaaagcagaaggtaacacaagcaggagaaaaaaaaatcaatcaacagaaacagacccagaaatgacagagttgatggaatccacagatacaactttaaatatgtcaacaaggaaaaatggttatgctagactggtgcaattatgatttttttcttatttttctaaatatatgaaaattaaacaaaaagaacattaatcccttatatgaatatttattttttgatgatgaacattattcccaagaacagataaatgaaggaaatgataaacaccacatttaagacattgattacctcttgggggagggagacagggagaagggtgcaactgggatagctatgtagaactagacagtgtggtagtactacatttcttaagctaagaggtgtggatgtgccattgtattattctttatacaggtactttgtttatcttaaatattgcaaaatacaattcaaaaataaacaagggctgggtgcagtggctcacgcttgtaatcccaacactttgagaggccaaggcgagtggatcacctgaggtcaggagtttgagactagcctggccaacacggtaaaaccctgtctctactaaaaatacaaaaagtatctgggcatggtggtgggtgcctgatatcccagctactcaggaggctgaagcaggagaatcgcttgaacccaggaggcaaggttgaagtgagccgagattgtgccattgcactccagcctgggagataagagcgaaactccgtctcaaaaaaataaaaagtaaaaataaaaataaacagttacagaaacaataccacatatttatattcagaataggagtagtagtgttatttccaaaactttttatgatctcccccatgatctttcaagatatgttactgaaatgagatcaaaagcgtgaaagagatcctcagtgcatgtgtgatttccctttagatgttatcttctgaggatgtatccagttttctcaacaaggcagacttgctatgtccctctgaaaatttctttccctttactgtataacttgctttttgttaattccacgtttagttatagttattgttctctgcctcttcagtgtttatctttcatctcaatattaaacactgatattgggtaactgagtaatgttcaattattcctttccttgtgttatttttatcctaagtgactgcaattatcttcatacatggaacatgaaaaattttattgagcaacctgtatttgcaaagttatttctgtaccactatttcctgcataaatttctcaaattgtttatagaagtaccatcaccacctttcgggtgacacagtatctcttgacctacaacctcaacacagagttgtaatatgaattagtcactattagtgggaaaggacttttttgtttatttgttttgaaacggagtctcactctgtcccccaggctggggtgcggtagtgtgatctcagctcactgcaacttctgcctcccaggatcaattgattctcctgcctcagcctcctgagtagctgggattacaggcacatgccaccatgcctggctaatttttgtatttttagtagagacagggtttcaccatgttggccaggctggttttgaattcctgacttcaagtgatccaaccaccttggcctcccaaagtgctgggattataggcgtgagccactgagctcggcgttgtttttttgagacacactctgttgcccagattggagtgcagtggtgccatctcagctcactgcaaccatggcctccagggttcaagactcatgtctcagcctcctgagtgggtgggactacaggtacacaccaccactctggctaatttttgtatttagtagagacggggttttcctgtgttgcctaagctggtcttttattttcactgtaagacatactcagtgatggtttctttctaataatggttaataggcttctgagttaggccttcagaatttgaattcctgctctgccattcaccagctgtttaatttttaaatttttttatcgttacagaatttttatttgacgatcctagcaaaacatccacaagtcaccagctgtttaatcttgtgcaagttatttaacctctttgaacctcagtgtccacatctataaaatggagacaataacagtacagtatttatttcttgggttgagggaagataacatataaaggtcttagcacagtgcttagctcaatacaaattaattatgggtttattattttgagaaatatttcataatgtcttcatagaaatcacctacgtttgtccagtggggttttttttgagacacggtctcactctgttgctcaggctggaatacagtggtgtgatcacatttcaccacagcctcaacgccccgggctcaagtcatctgctacctcagcctcctgagtagctggggctacaggtgtgcaccaccacacctgactaatttttaatttttttgtagagaccaggtcttactatgttgcgtacgctggtctcgaactcctagaatacagtgatcctccttctgtggcttcccttcccagagtgctgggattacaggcatgagccactgtgcctggcatcctctagtgtttgaaagaaattttttttttttttaagagatagtgtctcattctgtcacccaagctggagtgcagtggtgcaatcatagctcactgtaaccttgaattcctgggctcaagtgatcctttcaccttaccctccagagtagccaggactacaggtgtatgccaccacacccagctaatttttaatttttttgtggatatgaggaactcccctatgttgctcaggttggtctcgaactcgtgggcttaaggggtcttcctgcctcagcctcccaaagtgctgggattacaagtgtgagctactgcacccagcccaaaatggtgatttttgtgtgttccatctccatttattacatgtcagtctgtaggaaggaagaactttccctttttcccttaaattttgtaatcagaaaaaaatttttgtaaaagaattggatcccattctaattgaggtgtggtgtgtttccattctccttcattgtgctgggcctcgctgccctgtgacctggaccttccttcctttgccwaccgggctcagccgtgtgctcggatgacctgtgcactgtccttgtgggcacaggatcgtggcctaccacaagacaaattcgaagctgcacttactactttgttgtgcagttggtagttgtagatattcccaaaggagacccagtctctacagcttgggagatcaatgtttttgtgtctccatctctatccttttctctgtgcttcatctgtggatcacaaaaaccgctactccgaattaatccactattccaatgtttctcaaatttaagagtcacctgaaggcaagagacagtgttggtcaaaatgtagttcctagctgggcacaygcacrcctgtaatcccagctactcgggaggctgaggccagaggatctcttgagcctaggaaaggagtttgagacccctgactttaaaagaaaaataaggctgggcacggtggctggcatctgtcctccctctgcctggagaaagtccttttcctctttagaataagtaggtacaagatcaggtgcttgagggagcaggggggctgtcactgatgcccggaagggggcagatgctgcttttcgagcctctaagtcagcgtgggaattccccaaacccaccaaggtggaagctcgctggtgtcctctgcaatgtataactgccaccttgtggggtttccatactgcttctaataattgcaagatttcttgttgatattttatgtcttttcccccagagttcaataggcccttttctttatataatgctccatgcacttgaagggttaaaaaggcatatcaagagtcagtgtaaatgtttacagtcttaccttcactgagttctaaggcccgaattaaagcaatgagttcagctttctgagctgaagtgccctggggcaacgatctggcttcaacaacagtgtccagagttaccaccgcataccctgcaaatctctctccttgtgggttgataaagctgctcccatccacgtatagttcccagtctactgatgcccaaggctggtcccggaggtcaggtctgctagagtaaactgagtccaacacttctacacagtcatgctcaacagggctctctgatactgggaacaaggtagcggggttcagggtgttacaaacttcagtggttatacggggattttcacaaagcaaactttggtacttagtgagtctagcactcattagccaatgatgtcctttagtattcattaaagtcaccacagcatggggggcctttatgttccggttttgcccaagagtcagcttatctgcttcttgtactagcagggcagttgctgccaaggccctcaaacatgggggccatcctttaaaaaccccgtctagttgtttagagaggtaggccaccggcctcggccagggccccacagtttgggttaaaactcccaactgccatcttttctctctctgacacatacaatgtaaaaggctttgtcagatcgggtagccccagggctggggctgacataagtctttcctttaactcatgaaaggcttgctgttgctgggatccccattcaaaaggttcccggtcccctccccctttgtgacctcatacaaaggcttagctaatactgcaaagtttgggatccacagtctgcaaaaccccacagcccctaagaattctctcacctgccttctggtcttaggctccggtagattacaaatgacctgctttctttctgatcccaggctgcactccccgtcggatagtaaatcccaagtaacgtacctgctgttggcagatctgagctttttttcttggacaccttatacccacagtcctccaggtgccggagtagagcatctgttctcttggcgcacccgactgccgtggggtgtcccagcaaaaggtcatcaacgtactggagcaacacgcagcctaggtctctggtgggaaacttctggaggtctcgagccaatgcctccccgaagatggtgggggagttcttgaacccttggggaagccaggtccaagtgtactgagtagtgacacctgactccggatcttcccactgaaaggcaaacagcttctgcctctcaggggctaatctgatgctaaagaaagcgtctttcaggtccaagcaggtgaaccagctgtcctcagctggcagcaaccccagcaatatgtacgggttaggtactgttggatgtaaagtcactgtagcctgattaaccaagcgcaaatcctgtaccagcctgtagtccttggtcccaggcttgggaacaggcaggaggggagtgttccatggagactgacaaggaactataattccaaaggttcttaggtgcttgagatggacctggataccttcaagagcttctctggggaccaggtactgtttttgcctaaccggctgggccccgggcttaacttctataagtacgggggcttcgttgactgccaaccctggaggttgtcttccgcccacactcttggccaccgcttagccagagctggtcttatctcttggcccggctcagttaacaaaagtctccattcctcctctcgggggaccgtaagggtcataatgactcccgttccgggtaactttagcagcaaagagccgtgctctgtaaaagagatagtggctctcagtttgctaagcaagtcccttctcaacaagggcaagggataatcaggcatgtacaaaaactgatgaatcactttatgtcttcctacagtacaagtccggggcaagcagaaagcttgttttgctgaaactcccatggctccgatgatgtcaatagtctttttggataagggggcgactgggccggttactaccgaatgttcagcaccggtatctataagaaaatcaatgtctttacccccaactgtcatcctgaccataggctctttgggagtccttgagcccggtccccctcagtccaataacccttctgccaggttgagcagggccccttcctccttgtctggagcctcctgctccgagtcaccttgttttccttttagctgagggcatttgttcttccaatgtcctatttctttacaataagcacactgattacgctgcaagctctgacagccaggctgagtttctttcccggggccccccttcccttgcctttttgtgggagatccctctaattgctgcagctaacagctcggcatttcgccgggcctgacgttcattctctctgcggttttccttacggcttactgcatccctgtttacaaacacctggttagctatttctaataattgtgatgtgttcatccctgcaaacccagcctgtttctgcagttttcttctaatgtcttctgcgctttgactaactaaagccatgttaatcatgcgttgattttcagggctatcgggatcaaagggagtatacatgtgttaggcctcacacagtctctcgtagaattgtgctggactttcttcttttccctgaatgacctcagagaacttattaacgtttgtggccttctgggctcccctctaatccttctaagagagcttccctgtatcggtttagcctttgcatatcctctctttcatttgggtcccactgggggtcggttcccggtaactgggtccttacatactcttgggggttttggtaatcagccggtgcatgttcccctagccacttagttgctgcttggagcactctccgcctttcatctgtgttaaagaggaacatgagcaactggtggcaatcagcccaagtggggttatgggtctggataatagtttggagcaaatcaattagagcttgtggcttttcagtacaggacggggtattgtttttccagttgagaaggtcggcagaggtgaagggctggcacacaaaaacacgcctctccgccatgtgcccatcctcatctattccagtataccgctgctctctcaaggacatttgtatccccgttttgggtcttaaacgagctgccaagggaggggtttctcctgaggcttcacctcctctcttgtctactctgggtggcctagggatatgtttgtcttgcggaggcacaagcactgtggactcaaaagtggggagcctctctccctggtaaggggagggcaccactgggatgacttttgccatctcctgcaatggatcatctgatgttgggtcgaacagaacttcaggagttgatttccctcggtgggtggagcgggatccttccttgactatctgtccctttgctactagcactgctgctgcctgccctcttacccactgtggtaaccaagtgtctatgtatggaaactggtctgagtgtcctgacttaccagttaccttgtgccataccttagaaacaagggacctgtccaggcttccttctgatggccaacccacttctaatgttggccaatctatttcacacaaagttctaagtttccctggtgtcatagtaaccccatagtcgccattaaatcccttcttaaaatttttcaacatagttcctagaggagtaggcttattttgtgtctgacctgtgtttcctcaagacaaaacaccaagctcacaccaaacgcacaccacaaaacaaagaatgggtaaaaagggcacacacgcactttttcagttttcaccaaaccagaatcaaaaccaaaatcagagtatccagtaatccaagccaggtcaaaccaaaaccaaagtgtcaagcaattcaagtcaagtcaaaaacaaaaaccaaagtgccagtacaggcacgccgtgggtgatcaggccatgcttccactcaaatggagtgggcaagttccgaagaccagtcttaccaagtttcaaatgtccggactccaagtgcctgttccttcccggtgttcagccactgcgttgatactccacgggggcctgccacgcactgctctgactaggcgttccaccggggcaattgcctacccaggagcgctcgcaggatccgcgtcgctcaagctggcgggagttccccgcagggatgctccacagggcaggcctaagccccctaaggggctgcctcgactgtccgtcaattacctcgcttcccagtcagggaaccaagaaatatagcaggatgagtcacagacaaaactcctcagacaccagattaaagcaggaagaggttttttattcggccaggagcgttggcagactcgcgtcttgagagccgagctctccgaaaaagaaattcctagcccttttaagggcttacaactctaaggggtctacgtgaaaaaatcataatagatcaagtaagcgtgggaaacgtgactaggggctatatacatcagctaacagaacaaaaagttttacagtgctttctcatacaatgtctggaatttacagataacaccaatagttttggtcaggggttaataatattattattatcttagccaccagggccaggtggtggtgccaaggtcgtctagctatttatcttacttctgtttctttccaactttttgctttctcccttttctcctgtcttataaactagggaaaaggggaggttggggagaaactgagaaggacaacaggagaagtggtgacctcataccataatcctagcattttgggaggccgaggtgagagaatcgcttgaggccaagagttccctaccagtcctggtaacatagtgagaccctatttctaaaaaaaaaataaaaataataaaaaaaataaaaaaaaaattaaataaataaataaataaattagctgggcgctgtggcgggcacctgtagttcccagctaccgggaaggctgaggagggaggatcgctgcttgagcacagtaggtggaggctgcagtgagcagagatcgcatcactgcacccctgcctgggggagagtgagacccagtctcaaagaaaaagcaagaacaaacaaaagtggtctctggaacaaacctggacaaacaacccttcgaatagaggcaaatttctcttcctggagaagccgtgccactggcaactccccagggggccagctcgggaaaagccagctgaaacgagaggacgttcaccgttcctcgcctcgatccaccggacttcagaaggctacacgcggcaggcgccgctcgggatccaggggccggggtgagaacggaggcggagaaacccctcaggctccgccaccggggcggggaactgggaggcggccccgcctctgggcatcctcctgggtcttgcctagcggcgggcgcatgcttagtcaccgtgaggctgcgcttgcccggggcccgcgcccccctaccccggggaccgcccccgggccgcccgccccacttggcgcgccacttccgcgtgcatggccctgctgccccgagccctgagcgccggcgcgggaccgagctggcggcgggcggcgcgcgccttccgaggcttcctgctgcttctgcccgagcccgcggccctcacgcgcgccctctcccgtgccatggcctgcaggcaggagccgcagccgcagggcccgccgcccgctgctggcgccgtggcctcctatgactacctggtgatcgggggcggctcgggcgggctggccagcgcgcgcagggcggccgagctgggtgccagggccgccgtggtggagagccacaagctgggtggcacttgcgtgagtaccgccggtttgttcgggcggggggcgcctctttgtctcggtctttcgggggacagcctgtgctcgttcctatggcgatcctgtcccccggcgctgggctttcctcttttccacccccgcaactccccattccgaagccaggaacccagcaggtggaggagagagaggcgtccgggggcttctctgcggcccgcaaagccgagccagcgtctgcttccgcacggatgcgatattgaccagggccggggcgggttagattaaccttcctccatcctcacttgtccaagtgggagaggattggattctgttc

SEQ ID NO: 96753 - DNA, 28477 bp, Homo sapiens
  misc_feature (1)...(28477): n = A,T,C or G
atatgttatatatattacaaaccacaattaaatagaatgaatgaactaatgatagatacaacaacatgagtgaatcttaaaatcattatgttgagagaaataagttatacgcaaaaaaggatactgtataatcccatttatatgaagtttgagaatgagcaaaactgactcagaactcgggtaggaactgactagaaaggagtgtaaaatattttcctctttctccgccaggctcagtttccataaggagagtggcccaggccctcctcttctccatcaaaccctttcatcaggcgatctcaacttgttcttgctttaattcccacttcacatttatggctttcacaaatatgtatcctgcctggacctctcccctgagcttttggtgctcactgcctatttaacataacccaaagagaattattgatttcctcaattctcccaaaccttccctatctaaggaaatgatattaccgttcactaaataatcagacaaaaaacccaaaaccaaaaaaaagggaaacaaaacttctaagcttcattgttgattcccatctctctcacacatcatgttcagtccattagtaaattatgttgactctgctgtcaaaaatgtatcctgattctaaccaccttccatcaaccccacagtcacaaccctaggctaagccactgtcatctctcctgacaagtactgcaatggcatctgtgattgacagtctcaccagataatatccaacaagggaaaagacaatttcacaaaaggaaatcaaagtactgtagccaaaagaggtggaattggtaagtgtctgaaggcaacaaatgacctctgaattgatttttaccgattgttaaaaatttttttaccatttttataggtaatatttaaatttttactttggaacatctggcattcctatactatgcaatattacaaacttttcagccataattgttcaaaagatgaaaatggaatgagaataaaaatgtaatctatgtatgtataaaaatctctcaatgtgataatggaaaactgtgctgaatatttttatcatgttaggaacaagaagggctttctaagcaaggacatatatccagaaactcttaaacaaatgcaaattacaatagtaaaaataattgcagctggtatgaaagagtatgaaaattcccattacataagagtctttgctgattatatagaaaaagaacccaatagaaaaataaattattgaagaaacagacaattattttctttaaaagtatacaaattcctttaaaagtaaatacatgaaaatttgggataaaaatgaagctgcattttctttatgtatcagattggcaaaattaaaatgatttataataccagtattggcagaatgtggagaaattggcacttgcactacattagtagtaacataaattgagacttagagtagtttggcaacatctattaaaacataaagcacacatacattttgataacaactccaccatcttacataaatatttccacaaaagctcaaagatatctatgttttgtgtgtgtgtttttgtgtatctatggtgtatatttatataatcattacaaataatgacttctataaactgacataggaagggatctaaaatgtattgcaaagtggaaaatataaggtgcaacacagggtatatttccccacgatttttattaacatatattcatgcatattagcataagctttaaaaaatctgtaagaatatatcagggactcttaaccatgtttctgttcttagagatgatatctgaaaaatcattttcgtagagcattagggtaaactatccaaacattagaaataaggaacatgactctgtactgggacaaatgaagctatcttctatacactgaaatgcagtataatcaaagtagtgtcctatagatttggggcattaaacggtcttcctggtatgaaggaattggcagttgatggcatgaatatctcagtaaaataatttttcatgatatagagaaagatcagcctattctcagaatgctagaagagaaagcctaccttgcccttttgccttcctgtccctcaagttccacattctcacaccaatcaccttcactgatctaaactgccctagtcagcttgtctgtttctaccctgcatgtaaagtgggaatagaaccaacagccttcttttaccacctctctttaaaggcatacctaggggtgcatcttaactggcttgcaaatgcaaatagagaccctgcaaatagagaaggtggaacctacatagaatcacataccactgaagttcaagtgtcctgagtcctcatcttgggctctaaagcaaaagtacagccattggaaaaggcaacctggaagcgcacattccaggaacatctctgaaaactgacatgggaagaaaggcaaatactcctagagtactcatctccaggcattctagaaatgtccatagatatttgtatgcagtacaaaggtgtcacttcccccaaaactattgagaaacaacctgtatcacacacacatagatatctatacattgatacatatgtatgcaaatatacatacatatatcaattatcatccaacaaaatgcatccgcttggttctcaaaagcgatgaacaccagagcagtatgaaaataggacccagaaagaaaggaaaaacagattaaactcaaagtgaatgattttatctgaacttctctatttctacttccacaattcaaattaaagtgacacacgtctagattttgtcattattgtgtgttttgttttgtccttataaaaatgataggacaactgcataaaatactctccattaactcatttagtactcacaaaaatctcacgaggcatgtactattatttcagctttccaaatgaggtacagtgaggtaaactgaggaagagaggcactcagagttattgttcacaccatgcactggcattttcttgaaacagttctcttttaactgatgaaatttaagaatattcccctcctgaaatgctctatgaattctaggccataaaatatcaactcgcagtggcaaggcacacaatgtgtctgtgatgcataatgcataccgccaacctagggcttattacaacttacgctggagcagcaaatggaattcggtcccaaagctttaatatgtacgcgtatgtgtgggaaaaagacagaagaagcctttgttattacaaagtcccaaaggaagccagtaccccgcagcaagttctgactgtctgcactggaaatcatggagggggactcccctcgccatctgggtcgcgcgcggcccgcggggcccagggcgcatgcgtggcctggcggccgaggcgcttacctggtgcgccggacaagcaagcagagggccaggagcagcagggccgcggcgagggccaggcccgggaggcccaaccgctccagcgaaaagcggcccgtggccgcggacacttctcctgccatccggcgcgcgctaggccgcggtgggcagcccggggtctgcctgcgaacagcgcggtcggcgactctgcagcctgcggcggcttctctcggcggcgccccctagtccagggccggagaggctggcctgcccgcagcgcagacaggaatgtcaccgtggtctcccaggctgaatgacaaaagttcgtggactgccccctccccgcctatcctccacccacgcgtaccgccccgttcccccaccgtttccgacccggcagcttctggaaaacagcgcccttgatcctcccgggcaggaagaagggccaaggaaggggttagaagggaaagagttaggatttcccaagaaccagccctgaaggcctggaggtgggggatttcgcttcttagttggacgggagccccttgggttcctcacttcttagcccgcgccctgcgggaggagcgactctgcttgtccctcaagatgcttgtgaaggtgcccgctgcgctctgacaccggcgatctcttaggtacgacccagcggggttgggctggcggcagaaaccggcggagtgcgcgacctcgaacccgtttcgcgcccacctccttcacccccttacatcctatttgctcacaagttttggttcaggcctgctgtgtgcagaggcgcgtgccagagacacggaatacaaagacttaggccgtaagcctttagaagtcccgatgaggcacacagtacaggaagagagtgagacaggtaaaaagagattgcagaacagcgtggtaggggacgaaagagaagtggttcaagtactacaggttgtactcagaaagaataagggagaaacttttaaaatacctttttctgagtaatgaccatccactgggtactttacccacgtttttactttctatttttaatgtgtattttatagaagacataatgagactcagattaagtaactgaacttggttgctcacttgataaatgtttaccattcccactgataaatatcggccgttctaaccacggtcctattcgaggacttgtgtgctctgtcaatgcaacacttctctggaatgggtacagcagcttcaaaaccaatctctggttttttacccttccagtccatcatccccatttccacctccctaaaacacagacctctccagcttttactctgttcaaaactcttaatggttgtctttgtgacgaagtcatatcctccacctgcaatgagaagccctgcacaaattgtcttcattgtacaactcccctcgccagaacggttccatatatatactcaagcttgggccaccatgtccctcatactcagcctgttcacattattaacttaaaaaatccattgtagttttgatttgcatttctctaatgatcagtgtcattgagctttttttcatatgcttgttggccacatgtattttggaaatcagtgtggtagttcctcaaagacagaactaccataggatctggcaatcccattactgtgtatatacccaaaggaatataaatcactctgtcataaagacacatgcacgcttatgttcattgcagcactgttcacaatagcaaagacatggaatcaacctaaatgtccatcagtggtagactgcataaagaaaatgtggtatatacaccatgaaattctatgcagccataaaaaagaatgagatcatatcctttgcaggaacatggatggagctgggggccattatccttagcaacagaaaagcaaatacagcatgttctcacttataagtgggagctaaatgatgagaacacatggacacatagaggggaacaacggatactggggcctgctggagggcagagtgggtgaggagggagacgatcagaaaaaatgactaataattactgggcttaatagcttggtgatgaaataatctgtacaacaaacccccatgatgtgaatttacctatataacaaacctgcacatgtgtcctaaacttaaaagttaaatacataaaataaaaataaaaattcacaatttttaagttttgaaaaggagagaggagactttatttcttccaaagggttacagcctgcaaggtggccatccaggcaaaactagagacaggcccttcaaaggagggcttggggtgggagctttatgctgaagaggttggctaaacatatatatttaactggttacaggaggagctatgaatattcatgaaggtggtcctgacacatgcctattgaacaaacatgcacgtaacatatgacccatgttcactttggggtggctacttaacatttaaatgtgctacagttatgctttatatatcaaaagatcattttacatacaaaggtaggtaagtgtgtaatctctgtaaactggcaaaaccagtcaatggtcagtggtcttcttaatcaggagaaagttactgaaaccagactcttgtccaatcaaagctgtagttatggcttgtggaacagcagggtcagttagcatctgatggtggatgagctgtgacttttaatgttgcaaatcctgaggccagtgcttttttagttgctagagtgaataaccttgtggtggttagaacatagtatatattttaagttttactgtccatggttctaaagctgtgaatggctagattagccccagaatcttgatgtttacgagcctctttgtctttgacttctattccagagtctktctcctgcctctcctttctcctgttgtacattgaattttccaggcagtccaaaatattgcagtaaactgacagccactctgtctcttccaagagaaaacaaattgagtgctttccgtcactgctgggacagcagagccagtttacaggagggagtccatgctggggcatttctgtaaccactgcagagagccactcactgattttcagaagaagtctcaatcctcatacttctgttttcccctagatgacctttgtttaaaaatataattaaaatactaagaattcattctacttactgaacatttattatttgycagacaccataccaaacatattattttatcacattaataacagcaaaaacccrtggttgattgccctgccttagagaagtggaaggaagaagcctgcatagttatttaccagatttggtttgcaactgtatcatattcctatgttatctgcacagtggcttacttgggacactttattatatatatgcaatacatcttaaatatatatttcttttgggttttccacttttattaaaagggaccttcgctctataaccagattaaaacaatctaaagataccttttatttttcttttactttcatggtggctcattattagcctcattatattcaatccagttcaattcagttttaacgccaaagtataccattatccccatcacctctctgacagagattgccggttgaccctccatatctgctcaccccttcctcctcagtaacagagtcctccatttttaactgaacaaatgccagtccatcataaagactacttctagttagctgggtgtggtggtgtacacctgtagtcccagctacttggctaatcaggaggctgaagcaggaggatcactttgagcccaccgaggacttagaggccacagtgagctatcatcagagtacactactgtacactccagcctgagcaacagagcaagaaaccctgtctctctcaaaagaaggaaggaaggaaggcaggcaggcaggcaggcgggcaatatagtgaaactgtctactaaaaatacaaaaattagctgggcatggtggcacgcacctatagttccagctactcgggaggctgaggcaggagaatcgcttgaacctgggaggcagaggttgtggcgagccgagatcacactacttcacttcagcctaggcaacagagcaagactctgtctcaaaaaaaaaaaaagaaaagaaaagaatgagatgtcacttccttcaaaaagctgggactaaacacattaatattggataaaagaaagtaaaaaggccactcgaaggaaggaagtagggaagcagggagggagggaggggaagggagtggaggggaggaagagggtgacagaaagaaagagtaggggaagtaaagaaagggagagggtgacagattgtacttcagtgactcactgcactagccaagtgaccctcatctaccaggtggctggagtgattagcctctttctctgttcttgttctaatctagcattaggacttgaactctggctttggttccccccatgccttaacttttgattctcaagagcctctgtggaagtcaacaaaacctgaataatgactatttcctctttcatttcaacatgtacatcctaattctgcccagattttgaaaatactaataaactggactgaaacattcaagtctacctacttaatgacttttgttaagtgcaaattatgttcatggcactatacttggcctattggacctataaaaatgaatgagatgggcttggtggctcacacatgtaatcccagcactttgggaggctgaagcaggcacgaatcatgaggtcaggagtttgagaccagcttggccaacatagtgaaaccctgtctctactaaaaatccaaaaattagccgggcatggtggcgcgcacctgtagtcccagctactcaggaggctgaggcaggagaatcgcttgaacccgggaggcagaggttgtggcgagccaagatcacatgactgcactccagcctgggcaacagagcaagactctgtctcaaaaaaaaagaaaaagaatgagatgtcacttccttcaaaaagcttggatgaaggggatgaaacacattaatattggacaaaagaaagtaaaaaggccactcaaagaagattgtggagtgaccatgggggaatttaaggatatgcacccatatggcctcaatcttgtgagctcctgggaagcaaatgatgtgctggaggggagggtagattacaggcttcagctgttaggaaacatgggaaagtaccactgtggaaaataccaaaatggaatttcacacattctttttccagtattgggaagtccgtaaagtcagaattgagtgtccaacactgaaaggtcctatcaacttttgacataaaatacaggttaggtttaggttttgaatcatatcaaagcacaacccctctataactaaaaagattgactgctgtttatttctctcccattcccatgagttttattgtaactaactttgatttcccattaccttcggttagaatgaagaccatccctgggcaaaattgcgaagaagtggaaggaaagaagagaaagaagaagaaaggaatataggtacctgttttacatacattgtttcatctaatcttcaaaaccaatctctgatgtagctattattattcctttttacataaaagaaaaccaagacttaaaagaattccaggacacccgtggttattcagctcttacgtccaactgtgaagtcacccgtcgttttcactgtaccaccttgccctccttagagttttcgttcactaaccctttacttacctgctcagtcattctttcttccatctttatggatccagttattaccttaggttgtccataaccgctccctgtggagacaattgaggctctgccatgaccttggccctccatggcccttgtctagctctgacgctggtctcaagttttccatctgaaaaatgatttaagactactttccctataagtttatgaggattaaattgttaggagtaaatatatatgtgtgtgwatatatatatatatcacaatgaaaatgcctggggcttcctttttttcacagttgagcaccttctgctccactggcaaagggtataagtagaagcaagttaatcagacaaattcagcccagctgaggtgttagcttattgatatattacttctgcccaattaaaatataaaataggtggctttcttctttccttaaggtgactattcaaactgattgtagctgagattgcaataatcacatatactgagactgctataagcccaaaagttattgtttaatttggcacatagtaaatagtgaggcatcgtagatgcaggcaccaaacttgactaaaaatatcttaaatcacaaatgcttccacttattctgtcgttctttacaatttaaacgattttagttgttttctctttgctttagttcttctttctcctataaagacagtttgtagtgctgacccagcatgcagtctggtacaggacacatatagacatggcaggcaaaaatcttattaaataaatgctgttgaatgagcaaagtgacacccaacaatagagtgtagttccatttaaacctttttttaataaagtataattttaggtaagacctgaatataattattttgaagcagcttcaaaaatggtggaacagatggctctgattatctccaagaggaaggaaaagattggagagttttgtcatttcttgtttaacagtcttggcattgcttatacacacttgagttttgaatactgtgatttataaaatcacaatcccgtgctaaacctcagctcattctcacaatctgaccctacttcccacgccaagttttgagactcactctctgtctctgtctctaactcacactggctattccaacatttcattttcccactagccttgaccctatatttctggggacaaaaagcacaagactctctccctgagcattccttttaatgagaaccattccctcctccagccccactccccatccacctctgttcactaaggaaatgttttccagagtcaaaaacattaaaaaaaaaaaattcggctaggtcagtactccgagaagcaaagacccctgttacagttcaggtcccaggaaacagactctgagagggacattatcgtaaaagagtgttttaggacaggctcataggatcagcatcaggcatgctgatgggaaggaaacatgcagagagagaagctgaactgggacacagtcttaccaaaagattcagctgagtccttgataatatgtggaactcaggtagcccttagaattgtcccaagatgaggtgcagggttcaggtctttaatgtcactggttccagactgcctgcaggaaaggagaggtgtctacaagtgatggggttctctttagctaagagtgagtcctgaaacagctgatgaggcaatcctagagcttggagcaaaggttcttccatgctgacagagaatctgggtgacaaaataatagtcagtatccactaggatgctacagaaatatgctggaggcaaatagcacataggtggtggaggtgcttgcactcatcttggatttgtaatatctcagaagcagagaggttagtgttactataggtgctttgctaatgagagaaacaacaatccaagatgaataaaagcaaattagcaaaatacctatagtaacattagcctctctgcttctgagaacacagcagtcacattactaggtgattctaatgttaaagagaaatttttttttatgagtcaggttttattataatattgcaacaaggaaagcctctaggaggtcagttcaaacatttactctgattacaaacatagggaatactacctaagtattgtcagagtaactaaaagaacaatttaaaatcattcaactcttgcctgacagaggacaatgagggaacataactagtttctccaaacaaatcaaaatcccataaaattatatcagaaaactactaaagcatttttttaggaaggttacgcttttccgtgaagtaggtatacatttcattaagcaaatgctttctgctgcagaaggggcttaggaccatttttccttcacgctaacattttacttgctcagtctaccatggtgcccttgcctgaagtagctccatcctcttagcagggactccacgtgggccagttgccacttggattcacattgggccctttcatacccacacccttctttaaagactagaaaaacacgacatgctctttctctcccccttcgtatctgactcctcgtttgtgagctctgttcccagctttctccccaccccctgctttcctttccaaagctccactggaaaatggtcaaattaattccctcaggattttctaaggccttttattttctcctgcagctttctaatcactaacatttccatggttattctctttctcctttcttctctgaagtctggcattttttccaccaacaaagattgctaaattttgacatttataaaagcaattcataacactaattatacatatgctggaagttttgaatattctgctttatgaacaaacatagcactaatgaatgagaaaattgatttgtaatgattctgaaaaacagtctaattgtctgcttgccagggttgcaatagaactaagatgggtatacacacacttaacccagacatcagccaggggcttcctggcacttgcttctgcgtgtgcaggatctgttttggcccttcaacagctgataaccaaaaggcagcactctgtaccttcacttgtttctgcaagaaacccaaacacagcaggcaccaacatctttgtggcagatttcttgaggggggtggggtcatattgtacagaacatgggatcccactcaaaaaattcttgacattttatatcctccagtcctcttaggccacatggcaataggaattttcttatgcttccctctgacaaagtccagcctctctggttccagtgtccctccagaattttcctctgcaaacatcaaatacctcctgcctttataatacaaagaaattcagctcacatcttttatttgagtcaggctttggagttccccatgctaagtagctgtcaaaaatttcttctgaacaaggagcatggaatattttcaaaatatagtcatcatcttcaaaagcaaaaaaaaaatttaactgacataaatcatttaatatttttcttttctttttagagacaaattctctccatgttgtccaggctggtctccaactcctgggttcaagtgatcctcccacctcagcctcctaagtagctgggactatgcctggctcattttctcttctagaaatttaagtagatacttggttaagtaggggagaatggtgtcccctccagcctattcttaaagatgttcgaatgacagtgactagtcagtcagaacatatataaatggacaaatatcaacacatgtcccttctgcatttacaggcacctcagaaactttcatttctagacatttcttcacttgcccctctcctttttacaggctggattcctggtctagaaaggtacaagggctaattcagaatttcctcttcctgcttttcagaatttcttcttcctgcctttgggtgtgccaagacctcaaaacccctttctcctttcccatgtctctttgtttttgctactttttttttttttatcagttctgagcaatctggacatctgttccttacctagattcttactgccaggctcagcaaaactcacagccctctagcacttacacaacccccgtgccaagacaaacataattgttgtaaggagccttcctaaactcacacagaaattgaagtgaagattggaattctaccctcctacttttctctgcagctctgactcaggagtcagaacataattattttacaaataaaagtctgaaggccgggcacggtggctcacacctgtaatcccagcactttgggaggtcgaggcgggcagatcacgaggtcaggagatggagaccatcctggataacatgatgaaaacccatctctactaaaaatacaaaaaaaattagctgggcatggtggggggtgcctgtaatctcagctactcgggaggctgaggcaggagaatggcttgaacccaggagttggagtttgcagtgagccgagatcacgccactgcactccagcctgggtgacagagtgagactccatctcaaaaaaaacaaaaaacaaacaaacaaacaaaaccaaataaaagtctgaaaatgaacaagagtagtttttctgagttgatgyattttcaaactttatctcacgtgaccccttgacaatccagtgagctgagtattattttcactttacacatgtcctttgtaacgtctgtgacaacaggtaccatgtctgtctcttttcaccaatgtatacgtaatactttgcagagttcatggcactttgtagattatcaataaatatttgctgaatgaatgaaaattagaaaactgatatttaaaaaaatgaaatgaaattaatatttattgaatacctactccgtgctgatcgccgagctaaatattctcatctatattttatctgaacaatagtccaatgaacttgaccaagttcccgaactagttagtgcaagcaaatgatttctaatttattggtatgaatattagttgcatttttctactgtatgtgtataactcattatatataatacattactagatccttcctattgaagcttaccttgcaatttagctcgtttctaacagatatctctagatgttgggtcagtatctatatacaatattaaagttttaatttgaagaaaacatcctggatacaaaacttcaggaaggtatttattttagaaacaaatcatctcaattgtgtctattagggacctcattttgacagtttcaattgtgtttgctgtaaggatttatcagtgtattgagggaaaaatggatgggacttccatgagtccacttagataagagatttggggccacatgaaatacgtaagcttgttcagaggataaagagtcagtgtgagagagaaaagataattttagatgagtagccattaatttttcctatgattctaccactcttttctctcttttacttcctttaaaatttgaaactttggaaagtaaaggctactaaagaaagaaaaaatgattttgctaaaatttctctaagatagtggaagcacaaggcagtatcattttgtggcccatgtattcacatataattagaagcagagtaggagcatatttcttgttttatgaagcagcatcctaggagccttaaaggactcaggggaccaatgtctggagaaggaactagacttcttcaatgtaaccagaagcaataacacaattccatagtgctggactcactgttcgtttttcagcccatgtcgtacttgccctttcagcagcactctcactttctttgaatactttcttctctgggttcccatgaatgtcctcttacttctctggttgcttcttggtccccttgggcagttcttcctctacttggccactaaatgtcaaagggctcaatcccagaggccagaggctcctctctttttactacaaactctaaacaggtaaactttgtgctttaaacattatgtctatggaatagctcctaaatgtgttggctgcagatttctttaagatgcagccccccatcacatgtcttttaaacagcccacatggttgttttataagcacctggaacttagcaagtccaaacaactcttaaccatagctaacacatctgctctttttcctaaagcatcaccatccatccagtggcccatgctcaaaactgaggcgccagctttggttctaagtcatttaactactctgttaaaacccatcttaaatctgtctcctcctattctctacagccatcacttagtccaagacagcatcatccaccattcatctgcatgtcctcagattttcccttgcctcattcatccattcattgtccacactacaaccatagtgatgatttttaaaaaatacaaattgaatcaagttactacaatattttaagtccctacaatagtatcacattgttttttgaataaaatgcaaacttcttaaccttcaagcttacatggtcctcagtgactagaccctarcctcatctctccccatcaactctgatctcattccaatatagactgcaatttggttcagtgaatgaacctggttctctttcagcctttacagataatccttcttacacctgctttctgacatctatacctccttggactagctaaattctaaatctccctctgaactgaaattaagcatcatttacttaggaaagtggtttctaattccccagtctaggtcagtacaacctattctttgcctactcagcatattaacttccccttgatagtacttatgacattatcattaaataataattcactgtaatgagttgttgaaagcctctccaccagaatgtcaacgtgtgaaggtagagattttgcctacttcactgctgtaaactcrcacaagttctttaacatagttggtgcttaacacgtatttgttgagtagatcaatcaatcgatcaatcaatcagtaatacaatagataaataagcgaagccattcaatatgtagtaatcatttcatgtgtgccatttactgttctaaggtctttcatgcattttttttttcatttaaacatcacaacagccctgtggagtaggtacttttgtaatctgtattttatatatgagaaaacaggtttaggaagattaataacatgcagatgtggaatatccatccctaccaccatgaccgtttttttctcatgaggccattgttcaaggacaggaatagctgaggaaaaaggctrcttatcatgatcttcctctgctgaggctgttctttgggcagcaattcacatagaacaaaaatatgtttacattttatgcccagttggagaggtctgtctacatacctgttccctagatctccttatcaacacttttctaatcatttttcttctacataacctcagcatacaatcaaactgttagtcaccactcataaatcagtgtagatctgtacttccggccatctctccctccaggtagaacaaaccaccaagtacattgcctgaagttatgcctacgcagaggatttcctttaacaacccttcttcagggacacctctgcatggggctgtagtattgcagatgcttttggatggtgccggtattttatgcagcaccctttgtaaagcaagctgagattttcttttttctttttaaatcaataggtcatagaaaatggttgtgggttgagaaagaggaggtaatatagcaagaatataaaccttgggagtctgatccacttgttcatggaaaatactatgccttgagaactttcttgagcctgacctagaatagttctacttaattatggagtgctgctgtgtacatccaactttatggcttggtgcatcagactgaattaatgatggataattcaggttgcatggtaatttggtggctgtggtcaagtgttttttctccatgagggccctgaaataagccaaaagttgcttctcaagaggagaatagttatatacagaaacagtgattcttaaacatttgttctatgatttatattgagggaccttttaakgwctccatacagcatctctatcttccatagataatttagtcaccataggatctgattggtccaataaataaagtagcagaacaactttcataacagcctgaacttgttaagagccttgacttgctctggacccttctcaaaactgaaagccttctgatttacccagtaaatagtatcaggcctaagtgagtatcagtatcaggcctaaatggaatatcaggcccaaatgaggtacatgttgcctcccaaatctaacgagacccaccaggtgttgtgcctctttcttgaggtaggagaaattgggtgcagcaacttgcttttcttgaactctggccactggacccctaaaaatttcatcaagatggcatatgtgtgtctagcaaaatgtctaagaaagtgtaattgtctcatcacaaagtccaatcagcatgatgacattaatttagatagaccaaggtgttatcctatggaacgaagaaatgataaaggtctcttttgactgaattattattatgagagctgaagatgttatatatgtagggcagtgaatgtgtattgctagctctgtcaggtgaaagcaaacttcacttaccagattaatagctatagtgtgccagagaatgtgttgatgtgctgcgacaaatagtctacatctggaatggcagctgcaatttgaatcatgaccttataaatcttacaatattctactataattctttaaaatctgtcttctgaataagccatacagggaaattaaatggggatatgataagaattacctgtattctttatgtccttgatgaggcaccaatatctgcatttcctctataaattttgcattgcttttgctttacttttgttttttgagtagaggtagttctcaggattttcatttaatctttcttcctacaatagccctcattcccaaggtcaaggaaccaatgtgaaaattctgccaattgctgaatatgttcattctaactatattctggaactgagtaaataataatttattcatatgtattctggaactgagtaaataatcactgggtgtattcagggaccactgatcctgctgggagatggatctaagccaaagctatattaactgcctaatttctataactttctggttatttctttttcaccaaaggtcagtgactgtacattcttctggagaagactgggtataaatttttagcagtgtggcaagacctttccttcagagggcctggtctctccatcattcagtggaggtcttactctttttatttgatctatgaactgattcaaataaaagaattggttgaggaatcataatgtatggtgagtcaagtcaaacttttattgcccagacttagagttttctttctgcttacacaaatcaagtaagactttagtaggttgcctatttattttaattctagggaaaccatgatcacttactccaaaccaaagatctctgtgcattaaaacattcagattaccacttgtctgtggcatttcttctgttccagtaacagaaaccctaaactcagtgatataaaatcataacaatcttgttatggtctcaggttctgtgggtcagaaatacagaaagtgtacatcagggatggcttgtatatcttctccatgatgtctggggcctcacttgggataactcagaagctcgtggttatttaacagctgggagcaagaatcacctgaacgttctgttactcacatatctgggtggtagatgctggctattggctgagacttcacctacacttggcctctccatgtgacctgggtttactcgcagtatggtgatatcagggaaattagaatactcatctgatggtttaggcctttgaggacagatgtcccaataaaacaggacagatactctgtcatcttttatggtttagcctcagaagttgcacaccatccaaagcccactgagagtcaaggggaagaaacatagccagatacgaaggtggttgcaacttgttccctgccagtcagggatcctatcattactactgaatccaaggagctatctgtttttagggaaaaaatattaatgacagcatttttttttaaatggccagtcatgatctgcagaaaatagctgcttgagagctcttcagggatactggtgctcccctcatcagtgcatttctcaaaccctcaaagaagagaatgtccagtagaacttcccaggagacaggatgtatgtgagcgggtcttacctgataaattcatttcagcaatctgagctccctaaatctctggatgttttcctctagcaggagtcaataaaccatagcccacatgttgactgcctgattttgcaaataaagttttatgggaagataattccatgccaatctatttacttattgtgtagggctgagtttaggccaaaatagtagaattaaataattgtaacagatactgcacagctcagaagcctaagataattaatatccatcccattacaaaaatgtactatgcacacttttgcaaattttgcaaaagaagttctggtaccttaaattcattttcaatataagccattttcaagtctaagatttagttaagtaactaagcaactagttagagtgattcccatcgcctcaaatcagtacaccgattgcatgacctctgcttagtgcgtccatattagtaaataacgcccttccaactttagacttctctaacctgaaccaatatttgtagaatacaatgccacccatattcaccaggtttctgtcaattagaatttagcaacacattgattgcagttattttggtatgtcatcatgaggtaatacttggtagctgaacccctagagtcatctggcatttgcatctgttcatagatctagaagcaatgagaggtgatgggagtagatcttgaggaaggttgttggtgttctgaaaataagagactttttacttcagataatagaagactaatctcagagaggggtagaactgtttctttaattgtcaaaacaaattctgtagaatttagggtttaaagttctcagctttatcagaatttgcttatatgtccccctttcaaaattcagggtcttattctttttccaggcaatcccttaagagacccttgagaagttgttaatttgatttgtattgcatgttagccatccacagtattagatttcgcattttgtttttagaaatctcaattctgtagctacagaaaataaaagtcacctttaggactattataaaagccttttagccttttggttccttatcaagagcttgagctgggaatgtaaagccctaatctcatgtttttccctccaagttctccctcacatttagaaacaatcaggtaatccatgataattttacttactcccactaaattgttctatggtaacaaccacttggacattcaaagtctttccaagtggctctagatgatactttaagtagtgattttctactgaaattcatagactaccattgcccaatttgccacagacaatgggatcacaaatgtcttcgaatctagccagagcaagaaaaaagttttagatcactaataataagattttgttactctagaattactttagataacaataattgtgttaggaagtagagccatcatacatattatgggaataaaagatttattatgggaactagactttaccaactgaaggaagagctgtggaagtgaaagtacaacagggaaatttggaggatctgagataaagcattaaccaggccacctgaagcactatggcaggtggacgtgctaaagcttgcagagaattcgtgaagcacagcatatccaatgtcaaactagactgtgaaggggaagcccatggagaggtgtctgagaagtcgtggcttctatgcagttactgcctctgtgagtctacagtcaagtagccagtggtggtcttagggccgctgtgggtcagctgggccaacagttggaaagataagctaagcaggaagtggagtggagtaaggaaaaggtggggaagtgaaagcccagaaggaaatttacacattcagagtcaaacagactctcccggtttcatcacttactactgttatctggagaatgttaatcaatttttgtgaatttccattttcctagttgtataataaatgcggataaaatatctacctttaggggctgcttgcttgccttttaacattttttggaaatccatttatccttctgttcttttttaagctaacataaaatgttttcatcataaagtaaactagtttcaaaagatgtgatttctgggctgttttaattattgacatatggtaacaaaatgataatattatttttaatttatctatgcaatataaatacaatagcagctttgtgcccaccatcaatttaaaaaatatatgaataagctctttttcaataatcagaaattttacattgttccattttctctttgaactcatatttccattccatttttcccacagagttttatcttaacatatttttatgcttgaaggtcttttattgatagtaaaattgcaatgaaaaatgtttataaattgaattttctaaatattagttgtgatcataagatctaatattttttatctgaattatgatataatacaatcattattggcatattatttatcaaataaaattaaatatattgtagaaattgataagtaaacctaaaaagtaaagtttaattagaaatggacattttaatatgtgtatatacatatgcatgtctatgaatatatagaactcctttctctgacagtgagaaacttggactccatcaccttcaatatatttacttacctagtcaatcccactcacaagttaccaactgcccatcaccaccacctccatcaccccatgtctacaaccgcctcaccccttttaggctctgccattccgcacaggaccactgtgtagatgctttcttcatcctgcttaggctcccacacttggcgctgggcttgcattcctacttcctctctttgtgttattacattcgaccctacctactggcttttggactaaattattcagaaaggaaatgagaaagggagagcggggaaagagagcatgcattttctatatatcttgacccttctcattctgagataggtaggtagattagatagatagatagatagatagatagatagatagatagatagatagacagatagatagataaagcacagagcttttccaaacgtttctcacctagatcacataatccaagatgtctttcaatacttactactgatttacttacgtttgttgctttatcctcaggatcttcctcagcatcagtaatttctttggaaagaattggggagaaagaagatatacatctttaaaaggaaattgtcactacctcgctaacccaactctacaaatatacctgacttcacagtacccaagcaaagacagaatacataatttttaaatctcccactttctctaggacagaaaaatgtatgagaaagggaaagacaaaagccctatcaaaagcttatggtgacttggttaaagaaggttgcaggcactgtggtaagagtttggatgggtgaaacataatcgtttgttttgtaatatgagataagtttggttgtcagatggggaagtgggaaaggaaaaccaaactgaagccctgaccacagacttattctaggcagatcaattttagcaaaaaatagagaaaatgaaaatggattttcttatatcttttactgcctatgaagttcttggaaaactatcatggattcttataggcacatgtacccagttgactaatttttggtgtagatgctccaaaacattaaaagtagcagtaaattttagtaaattgatggcccttacaaatagaatcactcatgcagataannnnnnnnnnnnnnnnnnnntcacttattattgataaaatatgaattcatgaatgagaataagaaatgggtataaattacacctcacttcttttttttttttttttttttttttttttttttttttttgagatgtagtctcgctctgtcacctaagctggagtgcagtggtgtgatcttggctcactgtaacctctgcctcccaggttccaggaattctctgtcccagcttcccaagcagctgggattacaggtacctgccactatgctcggctaatttttgtatttttagtagagatggggtttcaccatcttggccaggctggtcttgaactcttgacctcgtgatccacccacctcggcctcccaaagtgctgggattacaggcatgagccaccatgcccggccttacacttcacttctataagatagaacaacatgtaatagaaagcacaaaagtaatttttaaaaatttctgttttaattttttgccattgtaaatccaactttttatattaatatatttatctctgtcatattctcaactatttagatttaagttgtaaattactatttaaattactgttcaaatcttaaaagcaagaagtatttttaggagtggggatccacttattcacccattctgtttcatcattcagcaaataattgaatgcctaccaagaattaagtacagagcaagcacagagaatgaaatagggaatttatatatggtccctgcatccacagagatacagtcaagaattctttgattgaaagaaaaacaaacaagcaaaaaaatgaaaaaacaaaccaaaaaaatgaacttaaacaagaaaatgcaaaatacacattaacttgccaaaatgtgactcttagctgcagaaatttgagggccctgtttttgaggtgactacactggctcatccagccacaagcaccttccatacctgtgtacttttcccctgattcaatcagaaggtacattcaattgacatagctgtttggtggtgtttccacctctgggaatgggtgtgtgactgtaattggtagctctgcaataaacaaaaggaaagaagattttttaacgatgaggatgttggggtgtggaaactggttcttctactggcagaaaaagggaaagtgtatcaggagtaggaacatccactctagctttcaatcataagccaaaatctctctctggttcatcttatttaaaaaatcagcttagtttctcttagtctaaaattttaaactctgggtcaatccctacaatgctatttcactcttccacttccctccctttctcttcttttttgtttctctttcttttactgctagccatatggttcagctttccttaagagaactcatgcccataatcagagtaatatagaatgtatttaaagagtcagtgttgtaatgtttttctataattataatattaaaatagaactataatagttttcagatttgtaaaaaatatttttcagatatatgtatgtacatacatttgctacatgtgatgtacacatgaatgctattctcattgtgcagcacatcgtatagggaagcagctcaatcaccagtcagcacctgcaatttcaagcctctaccctggtggcctattaatgtttaaggtgaaggaaatgtcctgtggtaactggggctgtttaaaagaggaaggatggtgtcagagactcaatgcaacccaatatataaaaggaatccactttcctttttagtgcaccctaaggacatgcagtgatttttatcttgatgtcattttttaaatatttgggggtttgtggcgtgaacccgggaggcggagcttgcagtgagccgagatcgcgccactgcactccagcctgggcgacagagcgagactccgtctcaaaaaaaaaaaaaaaaaaatatttgggggtttgagaggttttttgtttgttttttggtgattttcttttcgccctgttaataaccacttcagtagtctaaatttcagacattaaactgatattgcattccttgctttgaggctcatattaaagccattgttttctctgtccatggcatcttaatatgtgtggtgtgtctctcctgactggcggccaaatttccctcaggctccggttctaactgccgatggcaaacctgtcctgccttgcagtcccaggggcatctgctcagtcctcagtttcagctgctctagaagctgcctgcctgtccgttggggccagccacttctcacaccgtgcatgggtctcagttgtccctgactaacatgcctctcgtcactgtcctcaaaaggttatccttttcatacgaactttggctcagtatcctcgtttttgtttttaggcttttgacgatgtggtgctaagatctgcgagtttttgtgtttgccttttgtctgatttaatttcttgtgactgtggctgaaaaaaagttttgaaatcagacatgttagaaaactcaggaacatttgggatgctccgccttcaaaacataaagcaatttttaatgcaatatgactaattgaagtcttcgaaattatgctccctcaaccttccacatgtaatttgtgtgattgtgcatagtatatggtcgacactttaaatcagcccattctgaatacactctcaaaatttggtgaaaacttcacctatttgttttcacaagatgtagtttaaaagagacagaaacgtcatagaaattaacatttcatgacacatgagacaaaaattttaggctcttgctgaactccaggagctctctgcacatgaggactagtactgcgttgctggatattttcttagtgaagctaatgctcgcctcaggtccctgctactcagcatttccagaggggccttgagaagtgacaggcctagagaatgcatgctaacttggcagtagtgacaaaggggtacttggaagttattccgcgttcagagcagagcacaatcaagagaatgcttgattactagggggaaaagaaggtgaaaagtgaggtgtgccaacaaaattgcctaggccttctggatttggggcacacttttttgttaattatttttaagaaaaatcattctcaaatgatatttcacccttttccctcatttttatgaaattctgcattttggtcaatttcaaaaaaaaaagagttaagaggaggtaactgttgtctctggatcattggttctcacagtgccatattcatatattcttgtggatacgagagttgttagtttaaagaattaatgaaaagatgtcaattttcaattttcaaggtgaattaacaaagcaagtcctaatcgatgtgactggcttttggttgttagacaagcatgtcatatgtatgtatgtatgccttcatttcatccctgtgctcttttgtttaaataaattatgttaagagaaaactgaaatggcaggagcttaccaatgcctgggggtgtgtgaaacggccctcattccccataactgtgggaaatcattccaccatgggcccagaccagaatactagctttagtgacttgcactgttttaggtagcagtgtgaagactagtcataggttttattgctgtaactcagaacttatttaaattatgagaccccgtgtttatcacttgaaagtagaattagaaatgacttggctgggcacggtggctcacgtctataatcccagcactttgggaggccacggcgggcagatcacttgaggtcgggagttggaaaccagtctggccaacatggagaaatcgcgactctgctacaaatacaaaaattccccgggcgtggtggcatgtgcctgtagtcccagctagtcagaaggctgaggcagaagaatcccttgaacccgggaggcggaggttgcagtgagccaagattgcaccactgcactccagcctgggcgacagagtgagactccatctcaaaaatagaaatgacttttattttgtcctttataacatttgcaatctccaaatgtcctcaatgagtttttatttcttaaaaaaaacacattaaaaagtaattaaaaatttaaatatctaattctagggttaggagtcaatatttatatcaagggtagtttaatttagctcatatgagttaaagaggaggaaacatttggggaattggcatattgagagtaagaaagtttcaaaagaagcgtaccaaaacactaatagtggcttttggggtttaaggtgattaaaatatattttgtacttgtctgcattttccagaatttccactgttagcacatattacatttatcagtagagaaaattgcctttagaagcattgctgagccccgtctgcagccctaggtgtctgattctgcttttatcaatgttgtggttcctttctctttgcaccgcagagcgaataaaaagcttggaactgttactacaccatgttgctataagaaaagaaaatgcagaaaaaatttagacttatagacagcacttaagaatgaagaacatagaaaaaccacttgcgtaaagtcactcacgccagggaaggatcttgctaagtgcttattcattccaccccttcagtgaaaacaacattctcccaaagcctaaaatttcacagttggaagtcttacttaaaaagtgccaatagctgtcatttctacatttgaataaggttagtcattgttgcttttttcctaacacctaaatcactttagttcactgaagctctagtagtgtgggcgtgggagtgggaccatggaggcattttgcagcgtggcatattccaaagcagggaggagaaatctgaaccgagactgtagtgaaaggctctgggaggctgggggtaaggcatgtgctctaggtacctagaaataaaggggaaggcctgggaaatcctaggagacttatagaatgaagaagccacctatcagaggcaaacatcacttgcttagagtcaatctgccggacgatacagccttgaggacaggagggatagaaaaattaacaagtctacaagggatgagctcagaaacaccaagcagatccagataaacaaacaccccctccaggatcctttacagtctgttgtctgatacttgaattgtatgactttattacttaccaaagtataatacttccagcaggagtaatgcttttaaagacacagcagagaatgaggagtgattgttcatggaaacagcatttatttctggagtgatacaaatgttctaaaatcatatagtgacaatatttccataactctgtgaatatgccacaacccactgaattgtacacttcaaaaagggtgtttttattatagtggatgaagtaaactccaatgaaatttattagatgaccttcctttcccctcttaccataccttaaaaaagatataagcaatcatttaaatcttacaaagaatacatgaacttacagtggagttcagggaagaaagcaatgtgagcaaatagttggaagacagaatgnnnnnnnnnnnnnnnnnnnnnnnnnnnnnnnnnnnnnnnnnnnnnnnnnnnnnnnnnnnnnnnnnnnnnnnnnnnnnnnnnnnnnnnnnnnnnnnnnnnnnnnnnnnnnnnnnnnnnnnnnnnnnnnnnnnnnnnnnnnnnnnnnnnnnnnnnnnnnngggcaaagtcaaaataactag

SEQ ID NO: 96754 - DNA, 84389 bp, Homo sapiens
  misc_feature (1)...(84389): n = A,T,C or G
ctaaattcataaagacacagagagactgaggaactattccaggttaaaacagacagaagagacgtggcagctaaatgccatgtggaatcctgaatgggaaatgttttcttcttttgctagaaaggacattattgcaacaactggggaaatttgagtagggtctatatattagctaatagcattatattgatgttatttcctgatttgtcattgtattgtgattgattgtgtaataagaaaatatccttatatttagaaaatacacattgaaatgtttgtggataaagggaaatcatgcctacttctttactttcaaatggttcagaaaaaaagcatgtgtgtgtgtgtgtgtgtgtgtgtgtgtgtgtgtgtgtgtggagagagagagaaggagagagaaagggacagaacttttgagaaatccaagtgaagagcacataggaattctttctactatatttacaagagtaaatctaaatttctttaattaaaaacatcaaaattcagcataatagccaactaacacaagaacagataaccaaataccacacgttctcatttacaagtgggagcgaaatgatgagaacacatggacacatagaggggagccacacactggggccttttggagagtggagagtggaaggagggagatgatcagaaaaaatgactaatgggtactagacttaatacttgggtgattaaataatctgtacaacaaacccccatgacacaagtttgttacctatgtaacaaatctgcacttgtatccctgaacttaaaataaaagtttaaaaaaaaaagatattcaaacaatgtaaaaagatgacaaataaggaggaaaaaagagcaataatatttaatcaaagattaatgtgcataatgagctctaaaaatcaatcccataaaaatgaacaaccggccgggtgaggtgactcacgcctgtaatcctagcactttgggaggccgaagcaggcggatcactaggtcaggagattgagaccatcctggccaacatggcgaaaccccgtctctgctaaaaatacaaaaattagctgggcgtggtggcacgtgcctgtaatcccagttacttgggaggctgaggcacgagaatcacttgaacctgggagatggaggttgcagtgagctgagatcacgccacggcactccagcctggtgacagagcaagactccgtttcaaaaaacaaaacaaaaaaaaagaacaaccaattttctcaagtgggtaagagatataaacaggcaacactctaaaaagaaaaacggtcagtaagcaatttttaaataagagaatcaatattaataatcaaataaaggcaaacaaacgagatataatttttcatccatcaaattaggaaaggttgaaaatttctaacattggcaaggaactatagggaaatactgtcaaattctactggcagaaatgcacattggcataatcttttgaggaggaaattagcaatatccattaaaattttaaatatgtatagcctttgacgatgaggagtttatcctacagaaataactacacaaacatgaaaagatttgtacacaaggatgttcagtgcagcatcataatgacaaaaaactggccaagtgcagtggttcacaatcataaacccaacactatgggaggccaaggtgggcggttcacttgagcccaggagttcgcgacaagcctaagaaacatggcaaaaccccatctctacaaaaaaattttaaaaattagccaggcatggtggcatgcacctgtggtcccagctacctgggatgctaaggtgagaggtcgaggctgaggtgagctgtgattgcacaaccgcactccagcctaggcagtggaatgagaccctttctcaaaaaaacaaaataaaataaaaaagataataacaaagaattggaagcaacctaaatattcagcaataaagattatttaaataaattatgtacaatcacatgatggaaaactgaacagatattagaacaaagcagaattgtatacattaacataatgatacaatatatcaggagaaaaatgaaagttatatatatgagcccattataaatgagttcatacttgttaatgtacaggtccactatatgtaactgcaaagaaagggacacaccatacatgtagtagtgacaatctctatctctgaactgtgtgcattcttttttttttttttgagatggagtctcactgtgtcgctcaggctggagtgcggtggtgcaatcttggctcactgcaacctccacctcctaggttcaagccattctcctgcctcaacctcccaagtagctgggactacaggtacccaccaccacacctggctaattttttgtatttttagtagagacaggttttcactatgttggacaggctggtctcgtactcctgacctcaggtgatccacctgcctcagcccaaaaagctgggattataggcctgagccactgcacctggcctgtttggattctcataacaaaaattgaacataaggccgggtgcagtggctcacacctgtaatcctagcactttgggaggccaaggcaggaggatcacttgaggacaggagttcaagaccagcctgggcaatgtggtgaaaccctgttcctactaaaaatacaaaaattagctgggtgcatggtgggcacctgtaatcccagctacatgggaggctgaggtgggagaatcacttgagcccgggaagtggaggttgcagtgagccaagatcgcgccactgcactccaccccggctacagagcaagactctgtctcaagaaaaaaaaaaattgaacataaaactgaaaacaacacagattattttctattatgtatgttaaggtcatggctttttgaaagaccattattcctggaaacttaacatagaaggcataagagtcagtagatttcaatgttcagaaagttggttaatgtttgacattacccatctaaacatcaacatgatccaaatcccagaaaaaccccaaacccccagggacatgagaaattcaattcacaattccattgaaagagaaaacctgagaattgaagtaggtgttttaattcacaaacattcaaccacctctgagtgtattactgaagttaatgttcagacttttccagttaataaaaaacaagttgaagttctgttggatatccctgagaggtgaacaaccacatatatcacagggtagaattagtgatgcatcatattaccgggcaaatcagtgatgcgttcaagatgtgtgaaatgcagaccccacgggtctcctcctgatccatggcattccctgagaacccctgggcatgcccaagacaggagcggggaggcaggcaactgccaggaagtggctatacccaaaactggaactaggtccgcaaatatgggaccagaggaacagagtgagacaccaaacctcagcagctctagaaagcaagccaggtcaaacaacaaatgtgctgccactactgtcaaaagcaaatatagaactaggagctaggaacttgaactaggtcaaacccaggggaatgtccaacattgcttcaccagctgacttgtgttccttttcactccaagtacaacgtttaggcccaacccatagaaattccaaacagcttctgactactatgtcacatccctaccacaatacaattttgaaggtctttgatctctatcagctagcctctagttgagccagataagcaaagtacaacaaatattgaaggcttatgacaccatataactttgaagacctaaccacaaccctgtaaaggctgggatgcatttcacagctgctaactggggaaccttggcttacctctttatcccaagaaattgcaagttaatagaaaatgtttaatgttaatttaaaaaaaaaactttttctaaggtaaaacctgacctcagtgcattcattcccattcagtttctcccatcttatccatcttcaaatcccaaagcataattgaaagaatcctccaaaacaaattcccttctgttcttcacacttggattttcccagacaaaagtagatttacagtttctaatactttttgaaccagaaatgaatcagtgttcattatcgatgaatcagaaggtacaattactaagattatcccatctcctaaatgttctaagtaatcaaagagtctatttactttcctacagtgctctagttttagagtgctaggatatcagaggtagagtacatcttggagatcaatcatatcattaatttccatctttttacaaatgaaaaaacaaacaagcatagattgcaagttgaccaaaatctttagactcttcatatgaacaaaaatacataaatacaaaaaagtaatctccaagtttacacatcagactgattaactttgcctccgataagtaacaccagtgtccattgtttattccaagaacttttcaccttccatgtctcagtgggtcagccttctccaatccttgaaatatgtgactcttgtttctacttgctatttataaaactgacattttgtgttgtccttgaggtttttttccaaagttttcatttaaattaagttttagattaagcttatttctaacttcactactgccatttcactgaggccagcccaagttcagtttacttcaggtccataacttatgggagtgaggatgttttatatattcaaatttcagaattaagcaagtcttaaatgttaggattttagaagcgacttacaggaagtgtttctttcagtacatgttcatcgaagtccaatgccttttctcctcctctaacttgctgattttttacccagcttgatctaatgaacatcttacatgagttttcagcacagcagagtatgcaaacatcttgatgtgaaacacatgtgaaaatgacattcaattcagccagaccattaagtctgattcattgaaactaaacctcaactaaattgagttgaaaacttatacccacacaaacttgcacacaaatgtttatagaagctgtagtcataattgccaaaaattggaagcgaccaagatccttcaataggtgagtggataaactgctacatccatacaatggaacattaatcaatgataagaagaaatgagctatcaagccacaagaagacatgaggggatcttaaatgcatagcgctaagtaaaagaagccagtctgaaaaggctacacactgtatgactccaactacaatcatatgtcactcaacaatggggatacgttgtaagaaatgcatcattaggtgattctgtcattatttgaacatcacagagtgtagttacacaaacctagatggtgtagcctactacacagtgaggctatatggtatggcctattgctcctaggctacaaacctgtacggcatgtcactgtgttgaatattgtaggcaatactcacactggtgagtattatgtatctaaacatatcaaacagaaatggtatagtaaaaatacttgtacagaggatgtttttaaatggtacatctgtataaagcaactccattattattttatgggaccaccatcatatatgcagtctcttgttgaccaaaacgtcattatgtggcccatgtctacatatgacattctagaaaaggcaaaactatagagattgtaaaaagatcattggttgccaggggtttaaggaagagtgatggatgaaaaagtggagcacaggggaattttaaggcagagaaactactctgtatgatacaataattgtggatatatgacattattcatttgtcaaaacccatgggacacaaagagctacacctaatataaaccatgagcttcagtgaataataatgtatacatactggtgcataattgtaacaaatataccacattaatgcaagatgttaataataggaaaaatagggagaacggatgggaaatctgggcttgagttcaagttttctgtaaacctaaaaccgctctaaataataaaacctactaatttttttttttttttgagacagagtcttgctctgtcgcccaggttggagtgcagtggcgcgatcttggctcactgcaacctctgcctcctgggttcaaatgattctcctgcctcagcctcctgagtatctaggattacaggcacgtgccaccacgcccagctaatttttgtatttttagtagaaacggggctttaccgttggtcaagctggtctcaaactcctgacctcgttatccacccgcctcagcctcccaaaaacctactaatttttaaaaattgttgaaaatgaggcaacagcatattttagctttgtaggtaattaacagaaactagtttttagtgacttgatcgtatcagcaaattggctcttgtcaactgattttcagcaatttggccagttcctgcttcctactaaagtcgcactggtctttctgttcctctaactgatcctttccagcctcactgttatctctcccctttcccctgacatccagaaggctagcttgaccttaccacatctcaattcaaatgtcatctccatggagaagtcctctatggtccctctgtccctcatacacatccagtgcctctccctccaatcacctaatgtggtaggtagatagtgacaccctctcccaaagatgtccaaatcctaatccctggaattattaatagttaatttgtactttgtatagtctcactctgctacccaggctggagtgcagtgatgtcatcacagctcactgcattgggctcaagtgatcctcccacctctgccaccccagtagctgggactgcaggcacatgccaccatgcccagctaatattttgtatttttttcgttgaggtttcatgatgttgcccaggttggtctcaaactcctaggctcaagcgagctgcctgcctcggcctcccaaagtgctagggttacaggcatgagccactgtgcccagccagtgccaacatttgtgattgttaaggctaataatgcacacagccaaatcctctccaaaataactctaacagcttacccgcaatgactaaatgctcatttcctgcaccttcccccagtgaaagatactgacacttgatatactttttaaaacttgctaaaagcaaaactgtacaatttggacttttttattagtagyaaagtataaaagttctccatatttttacaatttacttttagactctcatttgtctactggaaaaatcacttttaaaagaggattaggaaaataaaggtagagaaagcaggcaaacaagcttctactccacgggaaaaccgagtatttttagactgtatctttcttgtttagtaagtacctaactgaactgcaggtgcattttctcactaggacagcttctataggagccccaagcacaaacttgccctctcccttctctctctacagcagagatgggctccccacagctccacagccctgcaggggctgggatgatggggaatctgtgctggcttcgcttcttatgtccaggtggtccctcggcaatgtagatcccttagctggtctgggagtctgtaggaattccctttgcaaaatggatcatcacttatgttctccaactcccctctccaggctttccctgcccaccccaaatccatgcttccctctgttgtgccctgtgcttccttaaagtactcattggtccaaaacgtcaccctcctccagggcccctactaggatgaggcatggtcgtgcatgtgcagggttcaattctgtctttctttacaattttgaggggccaggcgtggttgctcatgcctgtaatcctagtgctttgggaggccaaggtgggaggatcgcttgggccaggagtttgagaccaggagtttgagactagtctgggccacacagcaagactctgtctctacaagaaatttttaaaatagcagagcatggtggtgcacacctgtggtcccagctactccgggggctgaggcaggaggctcacttgagccaaagagttcaaagctgcagtgaggtatggttgcaccactgcactccagcctgggcagaagagtgagaccctgtctctaaagaaataaagttttgatattttgttcctggaagggtttttctcattaactttgtttttttaaaatattacattaaagaataatttatcttggccagatgcggtggctcacacctgtaattccagcactttgggaggccaaggtgggcagatcacttgaggtcaggagttcaagaccagcctggccaacatggtgaaactccatctctactaaaaatacaaaaaaattagctgggtgcagtggtgggtacctgtaatcccagctacttgggaggctgaggcaggagaactgcttgaaccggggaggcggaggttgcagtgagccgagatcagggcattgcactccagcctgggcgacagaacaagactccatctcaaaggaaaaaaactactgagggtttttttggctcccccttaaattttacgtgcaaggcaagtgcctcagcctagccctggctctgcctgcgtcccactcagcagagacccctccctccctccacaggggcctccctcagagaaaagattgcttggtcacatgaaggtgcacatgacttaaccaccacctttcttgggagacatttaaaactattttttcttttctttttctttttttttttgaggcagagtttcactgtcgtcacccaggctggagtacaatggcgcagtctcagctcactgcaacctccacctcccaggttcaagcgattcttctgcctcagcctccagagtagctaggattacaggcgagcgccaccacgcctgtctaattgttttgtatttttagtagagatgggatttcaccacgttggccaggctggtctcaaactcctgacctcaggtgatccacccacctccatctcccaaagcactgggattacaggcgtgccccactgtgcctgcccaaaactattttttcttaatttacagaatatctcattgttctatgatgaacacattagcaaaaaagaaaaatcaaaaaccacccataggccaggcgtggtggctcacacctgtaatcccagcactttgggaggccgaggcaggcggatcgtgaggtcaggagatcaagaccatcctggctaacacggtgaaaccccgtctctactaaaaaatacaaaaaattagccgggcgtggtggcgggcgcctgtagtcccagctactcgggaggctgaggcaggagaatggcgtgaacccgggaggcggagcttgcagtgagcggagatcgcaccactgcactccagcctgggtgacagagtgagactccgtctcaaaaaaaaaaaaaaaaaaaatcacccataatcttaaaaaccaggtaaaatttctacttttatgttttttaaaaaatacaaaactctgggtcagaggaagagatggcttgctaacctgccattccttagcatgataataagtacacttcttcaacatctcatgtagacaattacacttgcctacctgtataggatgggagactcctggaaaagactctgaaaagatcctctatgagtaatttacccctggaggttgggatttgaaggctaagggagggatttttatggttttttactccatatacatctgtattgttttgatattttacaataagcatgtgttatattcctagtttttttttgttttttgtttttttgagacagagtatcactctgtcgcccaggctggagtgtagtagcacgatctcggctcagcgccacctcctcctcccgggttcaagcaactctcctgcctcaggctcctgagtagctgggactacaggggtgcgccaccacacccagctatttattttttgtatttgtagtagagacggggtttcaccgtgttggccaggctggtctcaaactcctgacctcgtgatccacccaccttggmctcccaaaatgctgggattacatgcatgagccactgcacctggccctacattcctagttttttaaggtaccaataaaaatgaaaaataaatagctcatggaatccataggcggttctctctgcttaaaggcaggggtgctgaggagargtctcgctgcaagataattgtcattaggcaggtcctgtcaccagcggggtgggaccctctgtgtcctcaagggaatggttgtggccttgccacaggcaggtggccaggacctaggaccctggacactgcctgggaggctggtccacttccatctgggtttgggtacaagttgcaggtttggtattttttgtattctatggtctgaacaagtatacttgctcttcttttaatactttagggggaaatcctcttaattctttttttttctttttttctttttcttttttttttgtgagatagggtctccctctgtcgcccaggctggagtgcaatggtgcgatcttggctcgctgcaacctccgcctcccaggttcaagtgattcttctgcctcagcctcctgagtagcagggattacaggcacgcacgaccatgcccagctaattttcatatttttaatggagacagtgtttcaacgtgatggccaggcaggtcttttttttaatttaagacagagtctcactctgtcacccaggctggatggagtggcacgatctcagctcactgcaacctctgccttccagggtcaagtgattctcctgcctcagcctaccaagtagctaggattacaggtgcctgctaccacgcccagctaactkttgtatttttagtaaacacatggtttcaccttgttggccaggctggtctggaactcctgacctcaagtgatctgcctgcctcagcttcccaaagtgctgggattacaggcgtgagccaccgcgcctggtcttatttctttattttaaaagttatacttattttattgttgaaaatttttaagtatagattaaaaaaaagaaaataatatttttcaaagtgtctaaaattccagagaaaacaatagttgatatttgctatgtaatcctcatatattttcctagtgacatatgactgtcttcattttttgtttaataaaaatgaggtctaggctgggcgtggtggctcacacctgcaataccagcactttgggaggccaaggcgggtggatcacctgaggtcaggagtttgagacagcctgaccaacatggtgaaaccccgtctctaataaaaatacaaaaaaaattacccgggcgtggtggcacatgcctgtaatcccagccactagggaggctgagacagaagaattgcttgaaccggggaggcagaggttgcagtgagctgagattgcaccattgtactccagactgggcaacaagagtgaaactccgtctcaaaaataaataaataaaattaaaatgaggtcttgttttccaaattgtttaataactttcttttaaacttaatattacaagtgtctttcctggtgtttgttttaaatcgtcatttaaatatctttataatattattatatttcaaatatctttcctggtgcttgttttaaatcataatttttagtgattagggactctatttcactatggtatttcactgcaattccttaaatttttgaaagtgatttccactcatcattttcattcattatctaaatttttaaaaattaatttaactgcaaagaaactagtctgtggatatactaacacattacccacaattccacctccttaacacaactatgacgtactttatcatttgaaacacattgtagtcctaaaattgggcttgccagatatcattatcctcactgcacaacaggaagctcaagtccagagtggttagctgggtggcactggacaagtcactcatttagtctgagtacaatagcgtgtagaccccaaatgactcctaataaaggtaggagagctgtggctgccattggctggtggccttgccctctccattttctgttctctcagaatcaatcacaattccctctaaatggctgcagtctttgtacactcaaactttacatggcaggggagggtgctggtctttccaggcttccagcttccccatgtgaggctccgcccmgaggactggtttctttgccctctgagagcagacaggcttctacaataacttgctgagccctttggccttgggcttttctgcttagtttctgcagggaagggccatgtgctcacaggcaggtgccttgtactctatagtactctatccttgacatcaatattacattactaattgacaatgacacgtataaaacagcagagatgaaatggtcagtggttggcagataagagggaatgcaccaatagatgcacattaataaaaaatcatacaggaggctgggtgtggtagctcacacctataatcccggcacttcgggaggccgagatgggcagatcacttgaggtcaggagttcaagagcaacctggccaacatggtgaaatcccatccctactaaaaatacaacaattagctaggcatggtggtgcgtgcctgtaatcccagctactcaggaggctgaggcaggagaatcgtttgaacctgggaggcggaggttgcactgagccaagattgcaccactgcactccagcctggtcaacggagcgagactccatttcaccaaaaaaaaaaaaaaaaatcatatatgaagttcatgaccaaaatgaggctgcttcgcactgagaaacaatagctctaagtcaaaggaagcagatgagatggagattcggaggacctggcaggagcatcaaggtcccttatccacaaacttcctgcccatgctgcccagggaaaagcaataccagtctgtatcagccagggagaggcctgccagccaagatagtggctctgggctgtggttggtcacagtaaaggtcaaccactcttatgggcaggaactagacaagaacgctgattaaatagttaggccctaacataggacaggtagatgaggaaacctgagcttgggacagacagcccacaggacaaatcaacagtgcccagatctggccatctgcggaagtgctgacaaaggcctgagtcaatactttttattcctgagagcttaggtctttttgaacccctagttcagtccttgtagggcaggatctggatctcctgggacagagaaaacaatatctgtatttgataataagggctcagagcagattacaagaggtggggccaccaaggtttgaagcagtgaagggacttagatgcccatatttctagggttttcgaatatttgtggccacttatgaaactatcacttccaacagctattctttcaatagtaacattcaaatagaagcagagaccaagcactatagggcaagtgtaaagaggacacaccatggagactgctttctctggcagttcagcttgcatgcctcactcagcaaaactaagctcagaagttagttaggctcctgccctttagaaggcatgtgcttcagatagggatggggtctcagtctccctaccctgaacagcttattcaagtcttccttccagccttccagccttgtgccacaccatcccctccctgagaggtattctgaaaacaaagatttccccatcttgttgcatgcctggtgccattttagcactcttcaaggagtggtaccctatcgcactcacccagccagacttgtccaagaatcttgccctggtatgctaggcatggtggctcatgcctgtaatcccagcactttaggaggccgaggtgggtggatcatgtgaggtcaggagttcaagaccagcctggccaacatggtgaaaccccatctctactaaaaagaaaaagaaaaagaaaaagaaaaagaaacttgccccagtaaaccacttttttttttttggagacggagtctcgctctgtcacccaggctggagtgcagtggtgcagtctcggctcactgcaacctctgcctcccaggttcaagcaattctcctcctgagtagctgggactacaggcacatgccaccacacctggctaatttttttctacttttagtagagacggggtttcaccgtgttagccaggaaggtctcaatctcctgacctcgtgatccacctgccttggcctcccaaagtgctgggattacaggcaggagccaccatcccggcaggtaaaccactctttttagcctgaaggagagtaggtcagtctgtttcccattagtgtcctacatctttgtttgctyccttaagaagaatgtaggaccctgagggcaggaatccacctcctcctcattttgcaggtccacacaggtctctgacttctgcaaatgtcagaacacttaagccctcatactcaaaagacagtatttttagtgagacagcgtcttgctctgtcatccaggttgcagtgcagtggtgtaatcacggctcgctgcagcttcaaccgcatggactcaagtgatccttctgcctcagcctcctgattatctgggactgcaggtactggccaccatgccttgctaattttaaaattttttttgtagagacagggtctcaatatgttgcccaggctggtcttgaacccctggactcaagcaattgtcccacctcggcctcccaaagtactaggattataggcatgagccacagcgcccaatcataagacacatattgagtaaaacttggaccacagaaaacctcgaagtgtaatagaagaaatcacaaaactttagatcaataaacttgactgtataaagtgttttcaaaatccatatacatatatcattttacagatgaggaggcaaagctgaggaaagctgaatmatttgaacacgggcacacacattctttggcttgaaaggagccaaactgggaatcaaacccgggaatgtccagtgcaaaagcttgagggcctgaggactgcctctcactgtgtcatgcctatactggatgttagaacatgtgaattmcacacacacacacacacacacacgtgtatatatacaaaaatatatattttaaaatatgcatataaatttacaagcaaagcatgaggaagaaaacaaaaccatttgtaaaagaggaattacaagaaaataaccaaatgtgcactctccctggtgataaaaacgcaaatgaaagttgaataaggcaccaagttttgcttattgaatgagcagaaaaaaagacaatagctatgactgacagagtgaaactagcatccgcacatactattgggaacactgagaataggcccactctttaggaaatcatcctggttctacatatcaaaagtttttcaatgtccttctgttagttaatggttttttcagtcattcagtaggtattactgagaatctgtcatgtgccaggcattgaaccaggcacsactggagtaagcagacaggagtgtgggtcctcaccccaagggcagccatgccagccctggaatgaccaatcaggggcttgtagatgagagagaaataaacctcttccttgtctaggccactgttgttttggggttttctattacttgcagccaaactgaatcctatttatacagaaggtaagtgagctttcaccagctgctctggtttcttttttcttttctttttttcttctttctttttctttctttttttttttttttttttttttttgagacagagtctcattctgttgcccaggctggagtgcagcggagtgaccttggctcactgcaaccgccccctcccaagtccaggcgattctcctgccacagcctcccgagtagctgggactacaggcacccaccacaacacctggctaatttttttttttttttttttttttwagtaaagacggggtttcaccatgttgaccagcctggtctccaactcctgacctcaggtgattcacccgcctgggcctcccaaagtgctgggattacaggcatgagccaccacgcccagccctgctgtctggtttcttaatggagtagaggcaagatcaccaaaacacagtgagaatgtgggagggatgtgtaggtttgagtggaaaaggcatgaaattatcactgcagaaagggcaagagtgacttattagagaaacatagtaaaatggctgggcaatgatgagttctgtcttgagtttccagaaatagatacttaaagaatcccaattttaaataccttacacgaatgacatgcaccacattctttattatagaaaacactgggccgggtgcggtggcttatgcctgtaatcccagcactttgggaggctgagacaggcagatcacctgaggtcaggggttcaagaccagcctgaccaacatggaaaaacctcatctctactaaaaatacaaaattagccaggcatggtggtgcatgcctgtaattccagctacttgggaggctgaggcaggagaattgcttgaacccaggaggcggaggttacagtgagccgaggtcgtgccattgcacttcagcatgggcaacaagaacgaaactctgtctcaaaaaaaaaaaaaaaaaaaagaaaagaaaagaaaagaaaactctagaaattacataaatgccaaacagtgacagaatagttgtatcactcacaaaacttttctaaataattgttagggaaagtagatagcaatatataaaataagttataattttttttttttttgagatgtagtctggctctgtcgcccaggctggagtgcagtggcatgctctcagctcactgcaaactccgcctcctgggttcaaacgattctcctgtctcagcctcccaagtagctgagtacaagtgcccaccaccatgcctggctaatttttgttttcggttgtttgtttgttttgagacggagtctcactctgttgcccaggctggagtatggtggtgtgatcttggctcactgcaacctccgcctcccgggttcaagtgattctcctgcctcagcctcccgagtcgctgggactacaggcacccaccaccacgcccggctaatttttgtatttttagtagagacagggtttcaccatatcggccaggctggtctcgaactccggaccttgtgatgcacctgtctcagcctctgaaagtgctgggattacaggcgtaagccaccgcgcccggccaatttttgtatttctttagtagagacaagatttcaccatgttggccaggctggtctcaaactcctgatctcaagtgatccacccgccttggcctcccaaagtgctgggattacaggcatgagccactgtgcccagccaaagttacgatattttaattaaagcagtagaatacaagatagtacagatactataggattataattatgcatggaggaaaaaagttgggaaagtaccaaatcactaataatatatattttaataaccttaattttatgttaatattaaaaactattggccaggtgcagtagctcatgcctgtaatcccagcattttgggaggccaaggcaggcagattgcttgagctcaggagtttgagaccagcctaggcaatatggtgaaacagcgtttctacaaaaaatacaaaaattaaccaggcgtggtggcatgtgcctgcggttccagctacttgggaggattgcttgagcccaggagtttgaggctgcagtgagccgtgatcgcaccactgcactctagcctgagtgacagagcaagaccctgtctcaaaaataaataatttaattaaattaaaactactgttttaaaatttcatgttgagactcatcttcttgagtagctaataatctcttagaggtgagatgttgtgtgtctgtctctctgtgagcccacagcagctaccacaaggctggccactcagacttcacatagacatttgctgagttgaactgcctgagattacgtggggaatggagaagaagttcctctcttcaacaagttgctgtgttttctccgttggtcacaaggtctctcaccagaaggtgagccccacgtgtgtgggctttgtgctgcaccccttcttgagtatagggcttctaaagaagccagagcccgtccttaatgatattctcctcatgcaagaccaccagccagtcacagcagaacagtttctttaaaagggtggaacaggccgggtgcggtggctcacgcctgtaatcccagcactttgcccaggcgggcgaatcacctgaggtcaggagttccagaccagcctgcccaacctggtgaaacccccgtctctactaaaaatacaaaaaattagccgggcgtggtggcgcatgcctgtaatcccagctactcgggaggctgaggcagaagaatcgcttgaacccgggaggcagaggttgcagtgagccgagatctcgcaactgcactccagcctgggcaacaaaagtgaaactccatctcaaaaaaaaaaaaaaagaggtttttgacgattattttaaagctagctccctccggctgctctacaaagaatgtatgggagagcaggtaattgttcatgactctatcttcccttttgccactaggcaagacaaaaggaaacagccctcctggtgtgtttctggggaccagattgtcaaattaaattcgacctaggctgggcgcagtggctcactcctgtaatcccagcactttgggaggccgaggcgggcggatcacgagatcaggagatcgagaccatcctggctaacacggtgaaaccccgtctctactaaaaatacaaaaaaattagccgggcgtggtggcgggcccctgtagtcccagctactcaggaggctgaggcaggagaatggtgtgaacccaggaggcagagcttgcagtgacccgagatcgcaccactggactccagcctgggcaacagggcgagactctgtctcaaaaaaaaaaaaaaaaaatgttggcctaaagctgcctccataaatagcaagccacaacctaacttagtgtgtaaacaaaccgtaacctaactaagagtatattcttgtaacaagtagctgggtctctgccaatcataacaggggagctttcagccaatcccaggctgcagactgcccagtcaagtccaaataaggcaaccacccaggtgtaaccaatcaggctatttctgtatcacctcttttttctgtaagtattgcctgcccacttttgccttgtggagctctctgaacctttactggttcagggtgctgcctgattcatgaatagtttctttgctcagataaactctgctaaatttaactagtctgaagtttttcttttcataaaatccgagagagtatttaaaaattacagcaacaatctaaacattgtacaaaatacactatggggtcagcagggagactctgtggtgttaacctgtattctttctgtattttttttttaaagcagcctcctatatttatctagagcackgtacagtcagttctccatatctgcatccatggattcaaccaaccacagatgaaaaatattccaaaaattaaaaaataaaaatataccaattaaaaaatacaaataaaaaatacagtgtaaacaactatttacatagcattaacattatattaggtattataagcaatctggagaatacttaaagtatacaggaagatgtgtgtaggttatatgtaaatactacaccattttatagaaagaatctgaggacaggcatagtggcttacacctctttttttgagacagattctcgctctgtcgcccaggctggagtgcaatggcacgatctcagctcactgcaagctccacctcccaagttcacagcattctcctgcctcagcctcctgagtagctgggactacaggcgcccaccaccatgcccgggtaatttttttgtatttttagtagagacggggtttcactgtgttagccgagatggtctcgatctcctgacctcgtgatccacccgtctcagcctcccaaagtgctgggattacaggtgtgagccaccatgcccggccggcttacacctcttatcccagcactttgggaggccaaggcaagaggatagcttgaggcaaggagtttgaaaccagcctggccaacatagcaagacccaatctctgtattgaaaaagaaaaaagaaaagaaaggacttgaatgtccatgaattttggtacctgcatgggagtcctagaaccaatcccctacagataccaagagatgactgtatagagaaaaaccattgagcaaagccagaggcaacatcagttcaaactctgctaaggctccagaatgacaagattccaatctggtaaaaggtttggatgagagtgacagccttgtgttgacagcagggcaatgagccagttcagacagccccaagactttccctagtcaatcccaggcagagagaagccctgcccactacaggaacagggttgctgaaacagcaamtaggaagctggtctacaccaagaaccttgggaatcaggaaggcccaggaaaaataagtatctacaggaggttcagggacgatttggacctcacacccaagtgagaagcctggaaatccccaggggtgagagaacactgctttcatctacccttccaaaacgggtcccactgtcacccgtgcatgcccstatctgaaggacactggtgtctgatcatcccaaaaactggaattttttctcattgtggcctggctgtttccctggatctttggaaactgtggtcactgtcttattctgacaagatacaatcaaagttaaccaagagaaattatacagcactgcttaaccaaagtgccacaaagaaggtataaacagggaagggtgggagagaaacaacacacaggtatgtaccaatagcaggcaaattcattgggggccaatcccagttttattcatttattttaaaatgatttttagagacagggtctcactatgttgcccagcctccttagtagctgggactacaggcacacgccagctccaagcccagttttaaacactgattattcccttttgaagcagattcatcgaagatttctttaaataaatattttcatgaagcatttaaatacattcatttatgaagtgtgtattgactcatactttttcaggaacatgtacaaacacgtttgaccacagtcctctcaccttccttggaatgtccctctcttgggcctgtgatagctctttcctggttgtatcccttcatctcttcctctatttctctgtcccctttctcctcctccatcaatagaggcatgcactaagagtgcttctttgtggacttccgatctcttcattctttctccttgaataaccatcactcacttcttttacttgtcacctctactgctgataataatagctggcaactataggtgctctctgtgtgtcaggcactgtactaaactctcaagtttaatcctcccaacggtcctaaggagtagacactgttattatccccatttttatgtatggaaaaactgaggcttgggggcggaagcaggctgcccagggtcacctagctagtaaggggcagaactggattcaagcccgggcagcccacctcagaggcttcatgctgttcggtaagctctcaaaactggacatcttcccaaggggcggggccatctccaccagcccctcaaaccctgcatgtcacccaccagacattagagagtactcactgacatgtttgtactggctgtgaagatattaaaatactgcaaactctgtggcctggaaccctgtcttcaccctgtcaccctctccgctaagacctccccgtatccagcatccctggcatggggctgaggggtggaggctggtggggaggggcttagcgcccgcctggccttagccttgccagtgctaaaactgtggctaaatactgaggattgtgttgtttggttgggtttgtttgtttgttygtttttgagacaaacacaaatcactctgtcgtccaggctggagtgcagtgatgtgatcatagctcactgcaacctcaaactcctggcctcaagcaatcctcttgcctcagcctcccaagtaactatatctacaggcatgcaccaccatgcccagctaatttttaagatttttttgtagagacagacagagtctcactatgttgcccagggtggtctcgaactcctggcctcaagcaatcctcctacctcggcctcccaacgtgctgggatcacaggcatgagccactgtgcctgaactaaatactgttagtatcacgtctgcctccttctccttatgtctccacgaaccagttcctctgctgacttccttatttctggggcccacatctcattctccagtttgtattatacagagcctttttcccacagtgcctgccatgggatcccccagtcctccattctacctgaaaaactcgcaagcctcccgtgagagccatctgtggtgcccttggttcctctgtgaggctgccaccaccctgcaccctagggtgagtagtgccccagaaggacctcacaaactccagtgaagggactcacaggcacagtctcaactgtgtccctgaggtccccagccaggtttctctrccctgcagcccacgtggggtagagggaccatctaggcagctgtgaagctacctgggtgggtggtggggggaggcaagcaggagccccagtaaggagtcagggccccttggcagctgcggtcaactttgaggtttgcrgmctcctgctcctgtcttaaagggatgaggacagctcctctgaatgagggggcatggaccttgaggggcacctggggagtgagaggacagagggaagagkactagacagaggagggggacaggcagacctgctccctccaggctgggctggccctaccgggctgggtggggtaccccctccagcttatagggtctcccacaccatcagccccgctatggggcctggacggaagggctggggcaatggcctggggagggggctcgggaaacaaggctgtmgaacagggaaagctccagcaaagggaagccctctatgctgtacgtttcctggaaaggacgatcccggggggcagctgctgctgtcaacccggtaaagctcacaagcccccacaccagatccccccagatcctctcacggctcagctccagggaccggcagagactctccccggacgggtctcgcctccctaagggtctctgcttcgcctgtgagaggaggggttgatgtcctgactctaaggtgtctcggctctctgcgtcctcaggagcacgcgctgctgggggcgcgggcggcagagggtgggccctggagtccgagcccccgggactcgcgggcacgcggtgggtagcgggggacagagagggaacagcagcccggcgtccgctccaagtctgcccctcgagcagtggggctggggccccgatcccttcacgcgcgagctccgccaagcccccgggcgcgcggtcaccgagtggcgccggagctggggagccccccacgcccgccgcgttggcctcccgcccgggccgggtcctgagccccgcgatccgctgtcggccccacgacttacccaaaagtttcccttgaacagtgagcgcgtcatcgcagcgcgagtgggggcgcggaggagagccgggccgcaggtagcacagagcggggaggcctgactgccactgcccgcggctccgcagactcaacttctgcgttccacactcgcgcagggaagccgcccccgggtcctaaaccactcccgattgcgacggccgccgtcggcgctctgcgctccctgcgcgrgacctgggcgggaccctcggcgctcacccggccaggggctgcagcccgcacccggacccaggcccatttaaagccccacagcgtcgggccacgatcaatatatcagcccgaagctagctgcctccttctggaagtctttgggtattggaaataactggtcctggcttgggttcctgcccacaaggccccctggacmgcacgaaatccaggctctgcggggtgayagacgggatctgatcagatggtcgcgaggacccggtttaagctacagaaggcctggggccgacaactcccgcagacgccttggcttcacggcgggccccaccggcacctgctgcagatcaggccctgggggacggttcattttttattttactttttgttgttgcaggtgtttttaatgaatggggtcacgttttagtctaaaatgtcatggagaggtcatctctgctgtttccccttgactctagtcacttggtggtgtcctaacagggcttccaggagctcagccgctctctgactccctttccattctcaaaaggcaagacccttccctgcccattccaccccagcaagaggggcccaagattccttcttctccctccactcttccaccctcacaaataaaaccccagggcaggtcagacccctctctgcattgtagtagattggtacaaaagtaattgcggtttttgccatgacttttaatagtaatgcagggcttatgacaaagtactgcctggtgcgacaggcccgaagcccaacctgaggcccagaggggttgaatggcttgcccaagatcacagtttatttaagggatgaagagctcaaggttagagctctgcccttctaaatagatgcaaagacagacatccttcctggggcagatccatcctgggcagaggaataggtgctcaaagtggggaggataaaggtcaaggttgccragactggcaccagcccagcctggagaagcaagcaytcacccctggagcaggttctagctacacccagacacagtgaaagggcaattgctagaattatgtgaagcacctggaacaagttctgctccataaaactgcagccagccccactcagatgaactcccaccaataaagtcatccacaactgcaaagatggagaggtggcctccagccaccaagcatctccaagggatgcatccatttacgtacttgctcatatcctttgaaagcagtgagattagaaggaaggcagagaagcctggcagaaccatcaaggggcagcagaggacgtggtaggcactaggaagctaggcttaactgcagggggtaakaaatggcacaaactggggacatagaagcgggagagctgaagacaccactaaggtttttcctggaagttttaaatattctggaaaaatagtttagatacaattmtaattgtcacattttaatttttaatacatgtataattttaagttattagaacgtttcacaagctctcacagtacattgtgcttgattttcgcgactcagactctaagctccctgaattttaaccctcttccgccatctggtgacaaagtttttaattgcaaatggtcatccacgctgctggaaaatattcttcattcctcaaacagctcatctctggggcaggtattgtgagtaaaaaaacaaacaaagtgtgtgctatatccaagggacatatttaggatattttactaacttctgtggtttgaatgttgccccctccaagaattcttgttgaaacttaatctgaaatgagacagtattgagagaggtaggatctttaagaggtgattgggtcacgagggccactagtcccattcatggattaatgggttagtagattaatgggttatcaggagatgaaactggtggctttatgctttataagaagaggaagagatggctgggcacagtggctcatgcctgtaatcccagcactttgggaggacaaggcaggtggatcacctgaggtcargagttcaagaccaggcaggccaacatgatgtaaccccatctctattaaaaatacaaaattagccgggtgtggcggcacacgcctgtagtcccagctacttgggagggtgagacaggagaatcgcttgaacccaggaggcataggctgcagtgagccgagagtgctactgcactccagcctgggcgagacagagtgagacaccatctcagaaaaaaaaaaaaaaagaagaagaagaggaagagaggcctgaactagcatgatcaacctccttgccatgttacaccccatgccacagagtccctaccagcaagaaggctggcacaaatgcggcccctcaaccttggacttttcagccttcataactgtgagaaataaattcttttcctttataaactacccgatgtcagatactctgttataagcaacagaaaacatactaagacactaacaaaattaaacaatattatagcaattatgaaataatgaaattatttaatatatttaagacataatacatttaagataatcgctgtgaatattttggcatactctctttcaactatatatttgcaagagtaagttcttactgtacataaaattttgagtcttgcttttttaacttagtatttcataagtattttctaaaatcactcaatgtattttttctaacaaaaartttgatagaatacagggctagccactttataagcagacaattttgcacataaaaattgaaaatctctgtgaagggctgggcagggtggctcacatctgtaatcccagcactttgggaggctgaggcaggcagatcacttgaggtcaggagttcgagaccagcctggtcaacatggtgaaaccccgtctctactaaaaatacaaaaattagccgtgcggaggtggcgcarcacctgtaatcccacctactcgggaggctgagccaggagaatcgcttgagcctgggaggtggaggttacagtgagctgagtttgcaccactgcactctagcctgggcgacagagtgagactccatctcaaaataaaataaaataaaaatatctgtgaagagaaatttggccatgtgatcaaaatgtaaaatgcccctatcttttgacycattaagtccatgtcaaaaaacttaccttacaaatatattctcacatatgcaaagtaaaagatgacacagttgttcatagcagtgtggttattttggcaaaagacttgaaataattaatgtccatccatggagtactagctcaatatattgtcatatatcgatccaatgaaatcatattcaagcataaaaaatgaggaagctctttgcgtattgatatggaacaatcatcagatatattaataagtgaaaaacaaggcaaaacaagctgtcactagaatgagaagaaaaaagaacacacacacactttctttttttttttttttgagacagagtcttgctctgttgcccaggctggagtgcagtggtgccatctcggctcactgcaagctccgcctcccgggttcacgccattctcctgcctcagcctcccgagtagctgggactacaggcgcctgccaccacgcccagctaattttttgtatttttagtagagacggggtttcactgtgttagccaagatggtctctatctcctgacctcgtgatccgcccacctgggcctcccaaagtgctgggattacaggcatgagccaccgggcccggcccacacacacactttcaatggtcccctctaaagtggggatctggggcctgagagataggagagagcagaagagagccctacttttcatcccatgcccttctggaccttagaatttatactctgtgagtttattataaacccaaagaaaactcatcaatatcatttttaatttttgcataacttcccatcaagtggatataccaatatgtacttagcatttccctaatgcttttggaaatattactgtgataaatatcttttaaataaatcattgttaaaattattcatagtggaggccgggtgcagtggctcatgcttgtaatcccagcactttgggaggctgaggtgggtggatcatttgagatcagaagttygagaccagcctggccaatgtggtgaaaccctgcctctactaaaaatacaaaaattagctgggtgtggtggtgggcgcctgtaatcctagctacttgggaggctgaggcaggagaatcacttgaacctgggaggcggaggttgcaacgagctgagatcacgccactgcactcagtctgggcaatggagtgagactwcatctcaaaaaaaaaaaattactcatagtggaattacaggttaaagaatatgaatatttttaagggtcttgaaatatattaccaaatagttttccacaaaagttgtatcagtctatactctcagtagtctacagcggtgtccctgccttttcagaaacattggataacatcattcataatccttgttwtatgatcatggaaacgctctcattatgctttaaatttgcatagttttaattactacttgatcaggtttttcatacgcatgttttttcaggctatgccatcttttgggaattgtccttgtcctttgcccatttatctctagaagttttgttagttttcttttttaaagccagtcaaatttagcagtaggggactgtacatcaactttagtgacactaatgttagtaagttctgataatccactaccactggaccagcctaaagtcttgttccttttttttttttaaccaatttgccatttttgttgcaaacatgtcttgctctgtatttcacagcckagcacgctacctagcacatcataggtgctcaataaacattgatttaactgaattaatttgtatttaattagatttttgggggccccgttttcatgtttatacaaccctatgtattgacgtcctctgtcattttttccatkgcttgttttgcttaaaatccctttcccatccaggatcagtgcaaaacagatgtgacttggaagaacctcggagcagtcagacctatcttgtagttacaaggacttgctgacttcaaaaagtaagaaatcatcccacccaacctgtactcattacctattgctgcaaaatacattacttcaaaaattgcagcttaaaacaagaaatatttattattgcccacagtttctcagggctagggattttagaattgtgtgagtctggctcagggcaactcatgaagtggtagacaggctgtcggtggggctgcagtgggcctgagccccaccaggaactggagaatccgctttgagctaactcctgtggttgtctccagctgcttgctggctgtttgcctgaggtaaacgtcatagtggcatgggctttgtcataaagctgctcacaacatggcaacctgctttccccagagcaagggatctgagaaagaaactcagacagaggccatattatttttataacctaatctcagagccctatttagggccatgtcaccaacaagtggcaggagttcctacctaacccagaccccaaccctgggtctgaatggagattcccatgcaactcagatctgtgaggcactgctgtgtctcctctctgcccatcagtggtcacccacacacagcattaacactgctagctggagtctaggttttgctttggggaggaacccatactcttgtcagaatgccccggtacagtgaactagccatgccacttagaaattccatggcaggccgggcacagtggcctacgcctgtaatcccagcactttgggaggccgaggcgggcagatcacctgaggtcgggagtttgagaccagcctgacaaacaggaggaaactcagtctctaccaaaaacacaaaattagccgagtgtggtggcgcatgcctgtaatcccagctactcgggaggctgagggaggagaactgcttgaacctgggagctggaggttgcagtgagccgagatcgtgccattgcactccagcctgggcaacaaaagcgaaactccatctcaaaaaataaataaacaaacaacataagaagcactgacaaataaggaatgatgtttgaccttgagttacatttttcttttttttctgagacggagtctcactctgtcacccaggctggagtgcagtggcatgatcttggctcactgtaatctctgcctcctggattcaagcaattctcccgcctcagcctcccaagtagctaggactacaggcgcatgccaccacgcccggctaatttttgtatgtttagaagagacagggtttcgccatgttggccaggtggtctccttgagttacatttttatggatgtgttgttatacatattccaaaattattttagattcctaaaattctggtatgtcttggtatgttatcatgtaattatggtaattatattaaattattataggcacggaaataaccaaatttgtcaactgtgtctttaaccatgaccatctcaagtcatttccacagttaagtgcttagatccaacacattttctaaaagctctttgcaagcaagcaaaatcctraagtgtgtcttcaaagagattcatgaatggggggaggggggagggatagcattgggaaatatacctaatgctagatgatgagttagtgggtgcagcgcaccagcagggcacatgtatacatatgtaactaacctgcacattgtgcacatgtaccctaaaacttaaagcataataaaaaaaacaaaataaacaacaaaaaaaaaaacaacaaggagattcatgagaaggatggaatggaccctgacaagcactcttgaatacaggcttccagtaactttaggatcatattatttggactggataagaagtctcagaactctaatgaagagactgcctggtttatgaaactggtaatataaacaggataaaaactaattgaatatcaagaaaataatttgccatattttcatgccgaattagccagaactgaaattgtttatatatgcaatttgaatgaacacttatggtccaagtcatattacctgtgaaagccaatttaataaatagtgctatgcacctgaattagagaaacaaaaytggtagttaggaggatacaggccaggtatgatgtctcatgcctgtaattctagtgctttgggaggtcaaggtgggaggatcactgaaggccaggcagggcaacagagtgagaccctagctgtacaaaatatttttaaatttttaaaaaaagaatataaatccagtgttaagcagggactcatggagagcctagatggccacctggtcttccctgagtccttaaagcttccattattaaaagctctgcaatctatggatcatcatggaagggctaaaataatccaaatgatgagtgagtgtttgggtagcaactgtcctaaattgctaaaatggtttatgaccaatatttggtttgtcacatccatcccatgaagtaagtcaaaagtccggcagccttataactcttgccaaaggccaactcccccataaattctttcctagttctaccattaaacatagatcttttaatccaaatgacactttgtagtggttagttactccatcttatttgtatttctatgtagtaattatacagtatttacaagacatgatgaattggtcttttgttctccctcctcctccttactcctaggttaggtaagttattgatggagtccttttgtgtcttactcatctttgaatcctttttagtgttcatctcataggtaatgctcaattaatagctgaactaagtactacttcagatatgcttatcttaatattcttgcaatcatagattatagagctgagacgctaagaactttcaggagagcaaaaaagacaagaccttacagttaacaaatagtttttaaaatacaagtctgaaatccataaaacttcacatttcaaaggtcaagtgccttctcaaatgttcaccacccccagtgataagataaatgcacacagacacaattttatgacagccattttgttgccacacagaagggccacttgggcagtgtatttaggcctgcmtggttaaaaacagccaggtgcctatgaggtctcctatgtcattagtctgtaagtacttagtaaaaagcagtatttgaatctcatggttcattgctgtaacagaaagggctggactctatagctcagcaaaaacaccagggaaaggactatacagttttaggggagatcttgaagtcttctagcacaactttttttaagagtcagggthtctgtcacctaggctggagtgcagtggcgtgatcatagctgactgcagcctgtttcaaactcctgggctcaagtgatcgtcccaaagtgctgagattacaggcgtaagccactgcgcctgggctatcatattctttaaaaatatcacatatttttaaatgtgatatttaaaaatcacatttttaaatatcactgtgcctggcgtgggccaggcacagtggctcacgcctgtaatcccagcactttaggaggtcgaggcacgtggatcatctaaggtcaggagttcgaaaccagcctggccaacatggtgaaaccccgtctctactaaaaatacaaaaattagccaggcatggtggtgcacacctataatcacagctactcaggaggctgaggtaggagaatcacttgaacccaggaggtggaggttgcagtgagccgagatcgcgccattgcactccagcctgggcaacaaaaacaaaactccgtctcaaaaaaaaaaaaaaaaaaaaaaatctcatcagaccagaccagtagttaacatttggaatttgatttataatggacaaacatggttgtcttcatttgagaagtttattgagcatttacgtgccaggagtgggctacgagatccagtcaacaaacaaacaatacatactcccagtaataaattaattccaatccattagccaaagtatttttctccaaagtagtaatcaccactgacactaggtataaaatgctccaacaagccgggcgcagtggctcacccctgtaatcccagtactttgggaggccggtggaccacctaaggtcaggagtttgagaccagcctgaccaacatggagaaaccccatctctactaaaaatacaaaattagccaggcgtggtggtgcatgcctgtaatcccagctactcaggagcctgaggcaggagaattgcttgaccccaggaggcggtggttgtggtgagccgagatcgtgccattgcactccagcctgggcaacaagagcaaaactctcaaaaaaaaaaaacaaaaaaaaaaaaaaaaaaaaaaaacgaawtgtgcaraaccttctaactaaaagtaacttccttatttcaraaaaggaaaatcaratctagaagttatttctcaagtagctagaaagcaagagttgatcagaaatgaccaactgctatcaagtttagtgttcctctaagtactgaaaaggacttatgagtactttaagaactctccttttcctaccaaagatattggagcccacatatgtaaatatattttgacttactggagacagagagatggataagaatgaagtttcggtacagcaaatccccatcaacaaaataaaatggcaaggaagggggaaccctaggaaaaatattttagaacatgaccatgtatgacccttacagacaaaagcctttatatatcagtaaaaaaaaaaaaaaaaaaawgaggccgggcgcggtggctcaagcctgtaatcccagcactttgggaggccgaggtargtggatcatgaggtcaggagatcgagaccatcctggcgaacatggtgaaaccccgtctctactaaaaatacaaaaaaaaaaaaattagcygggcgtgatggcaggcgcctgtagtaccagctaatcgggaggctgaggcaggagaacggcgcaaacccagggggcagagcttgcagtgagccgacatcgcaccactgcactccagcctgggagacagtgagactccgtctcaaaaaaaaaaaaaaaggccaggtgtggtggctcacacctgtaatcccagcactgtgggaggccaaggcaggcagatcacaaggtcaggagttcgagaccagcctggccaatatggtgaaaccccrcctctactaaaaatacaaaaattagcagggcatggtggtgggtgcctgtagttccagcttctcgggaggctgaggcaggagaattgcttgaacctggaggcagaggttgcagtgagccaagatcaggtcactgcactccagcctggacgacggagactccatctcaaataaataaataactaagtaaaaaaaaaggtaacacattaagaatgagcaaaggctatgaaaaattaaaagtaaataaataaatcagtaggctgggcgtggtggctcacacctgtaatcccagcactttgggaagctgaggcgggcagaccacgaggtcaggagctcaagagcagcatggccaacatggtgaaaccttgtctctactaaaaatacaaaatgttagccgggtgtggtggcatgggcctgtggtcccagctaattgggaggctaaggcaggagaatcgcttgaacccaggaggtgaaaggtgcagtgagctgagattacgccactgctctccagcctaggtgacagagcaagactctgtctcaaaaaaataaataaatcagtaaaaaaaatttaatgcagtaagaatgagcaaaggctatgaaaagctagtaacagaggaaataaagtagctgtgaaaatattaaaagatggccgggcatggtagttcacacctgtaatcccagcactttgggagaccaaggcaggaggatcacttgagccaaggagttcatcatcagcctggacaacatggcaagaccctccctctacaaaaagtagaaaaattggctgggcgtggtggtatgtgcctgtaaccccagctactcaggaggctgaggtggaagaatcaattgaacccaggtggcagaagctgcagtgagctgagatcacaccactgtactccagcctgggtgagagagatggagaccctgtcacaaaacaaacaaaagagatattgacaagttttcataatcctatgcattctatcttctcagcttttgttccagcaattttttcatttccctgagaattttaactgtcctattattttcctgcctacagtacctctttatgcaggtacatcctctgggcagagaagccagctatgctcttcagtattgtcagcctgccacatatatccagtttaggaatttctcttaaacacaaagtactctagaaacttacaaagagcagccgggtgyggtggctcacacctgtaatcccagcactgtggtaggtaggccaaggcaggtggatcacctgaggtcaggagttcgtgaccggcctggccaacatggtgaaaccccgtctctactaaaaatactaaaaaactagccaggcgtggtggtgggcacctgtaatcccagctacgtgggaggctgaggcaagagaattgcttgaacccggagacggaggttgcagtgggccgacagggtgccactgcactccagcctcagtgacagagtgagaatcagtctcaaaaaaaaaaamaaaaaaaaaacttacaaagagctcagccttgaattatctagcccagttgactgtaccaatattcaagtaaaatagatcaagaagcatttgcttaccaatttctcaatttgatcttggttttaaagaataacacaaatgacagaaaacaactaygcattatggaacctttatttttcatgtgatttctgtacataaggagtatgagagtaamccttttacaaatggaactaatttactagaacaatgacaaaactgaactggtatttgatgtgaatccacaggagtttaagcttcaaatccagccaagaaatttgttacaatctctttcagctttgcatctgattgttctgagatctttccatcagccctatttggaaataaaagcaggtcgtaagttctgacctggaaaaagttttaatgactagcctaactacagatttgaaaataattttaacttcatatcttaaacataactttaaaaaaagatgccaasaattgcattcatacctgatagtgcccaacaaggcttggtgctggctgacgacatgagacaagaaagcattctcaaactttgtaatcttgctgggctccagtttatcaagatatccccttacacccgcatagataacagccacttgttcttcaatagccatgggagctgaaaagatacaagaagaatgccaagtgagttgctcaaagaaatgaatgccatgttaccaaggtcaggaaaacttactttttctccaattcctaacatgtccctgtaaattatctattcttcacaatatcaatgacctagaactccacttaataatccttcctcccacccctgacagaaaacagttatttcttatattttcaaggcttgaggcataatctttcagtatagtccataagcactgtttataatctgacagtgttaatactgttttgagtataaatattttgctgaaatgacttgacaaaataaaaacgtattaactttcttttaaatctgccaaattacayattcatatagccaagtgggggaggggactctaacaggccttaattcctgaaagrargacattaaatatacttaagttttcctggttgtgaagcccctatcatttacactcaaatgataataagaaatgtagtttgggccgggcatggtaactcacacctgtaatcccagcactttaggactctgaggcgggtggaccacttaaggtcaggggttcaagatcagcctggccaaaatggtagaggttttaccatttctactaaaaatatactccagcctgggtgacagaaggagactctgtattaaaaaaaaaaaaaaaaaaraaagaaaraaaaagaaagatagtttgaggccgggcatggtggctcacgcctataatgccagcactttgagaggtggraagatggcataaggccaggagttcaagaccagcctgggcaacatagtgagaccctgtctctacaaaatacaaaaaaattagccaggcatggtagtgcatgcccgtagtcttagctactcaggaagctaaggctgcaggactgcttgagcccaggagttcaagcctgcagtgagctatgatggcaccactgcmctccagcctgggtgacactgcaagacactgtctctctttaaaaaacagaatacagggccgggcatgggggctcacacctgtaatcccagcackttgggaggctgaggcagggtggattacctgaggtcaggagwtcgagaccagcctggccaacatggtgaaaccctgtctctactaaaaatacaaaaattagycgggcgtggtggctcacacctgtaatccgagctactaaggaggctgaggcaggagaatcgcgtgaatccaggaggtggaggttgcaatgagccaaggttgcgccattgcacttcagcctaggccgtaagaatgaaacttcgtctcaaaaaaaaaaaaaaatcaaaaatcaaaaaacaaatgtagtttaagtaaaagtgcctttgatgaaagataacagataacaacacgtagtacaggccgtgatatgtgatgcagctctgtaggcctgggaagaccctgatacacaataggaacctgaccaaatgaagaaaagaacaacttacaatactgtccttgcttcagcaactcagttagacgcacgccacgactcaaaagttgttgagtggcagcatcgaggtcagaaccgaactgggcaaaagcagcaacctcacgatactgagccaattccagcttcatggtacctgctacctgcaatacagaaattactgtactgtaactcagtgacacagagcactatacaaatatagttaatatattaataccttaagatgctaatctaatgatagcccccttactgccaaagtgatgcaaaattacctgcttcatagccctggtttgggcagcggatccgacacgagatacagacagaccaacgttaattgcagggcggatacctttgtagaacaattctgtttccaagaagatctataatgtaaggaaatacgcacgctagcaagcttaaagtaagaaatcaactatcttcaaatttaagtcattatgccaaaaagctgaaactcaaaacctaacaatgcaaagcatcagtaccccaaatctttcacgacctgacctgtatattttattgctgcaattaggagatgtgcatgagatgagaaaaaaacataataggcaacatatttatactgaaatacatacaaatgaagtgatataatttctatttgattcaaaattatctagaagggagaacagtagtggttaaaaatgaaactagaacgaaacaygctactctatgyaataactgggtgacagatacatggggtttcactatgccattctcctaacttttctatgtatttgaaattttccayaataaaaagtaaaatgcatttagcaaatcagycaatayaccattagtctcaaccaatgccttagaattatccaaatcttttttaacatttmttttaatcattaaaataatacctgtccgtcagtgatggaaatgacatttgttggaatgtaagcagacacatcaccagcctgtgtttctatgactggcaaagcagtcaaggagccaccaccaaaagcatcgttcattttggctgctctctcyagcaaccgggagtgtaggtagaacacatcaccaggataggcctcacgaccagggggtcggcggagcaacagagacatctgacggtaagcaacagcctatggtacagaataggtttgtgaagttaacctattaaatagaagttgcatatgtgaacttttacttcagtacaaataaatggattctaaaaatttatttcctttgacctgtttggataagtcgtcatagatgatcaaagcatgtttgccattgtctctaaaatactctcccatggaacagccagagtaaggagccaggtactgaagtggggcagcatccgaggccgtagccgacaccacaatggtgtacttcatggcatctgagaaaatatattttacaattttatcaatattgtggttttaaattggaggctactataaaaattaccyaagtgctaaaaatatttaccattaagagttaatcaggccaggcgcagtggctcatgcctgtaatcccagcactttgggaggccctaggcgggtgatcacctgaggtcaggagttcgagaccagcctgaccaatatgaggaaactccgtctctactaaaaatacaaaaattagccggacgtggtggcatgcacctgtaatcccagctactcgggaggctgagacaggagaatcgcttgaacccaggaggcagaggttgcagtgagctgagatcgtgccatcgcactccagcctgggcaacaagagtgaaactccgtctcaaacaacaaaaaaagagttaatcagaatcaaacagcttccactttaaagaaaccaacaaaacctttaaatgtactactgttttacattgtcttacctactgatttgtattaaaaagttcagcccattaggaagtaattaaaatatgccttcattaagtagaagctattctacaatcagcagcaatgggacttaagataatagcaatgggactaaatttcttttaatacctgcatctgtaagtctcttcaccaactgggcaacagtggatctcttttgaccaatagcaacataaatacagtacagcttcttcttttcatcagatccatcattgaaacgtttctggttaatgattgtgtcaatagcaattgaggttttcctttaaaaagagaaagtaaatataaatcttcctaaacttaaaaggacttccctgtgggggaaagaaagagagatcagactgttactgtgtctatgcakaaagaagaagacataagaaactccattttgttctgtactaagaaaaattcttctgccttgagatgctgttagtctgtaaccatagccccaaccctgtgctcgcagaaacatgtgctgtgttgacttaaggtttaacggatttagggctgtgcaggatgtgctttggtaaaaatgtgtttgcaggcagtatacttcgtaaaagtyatcgccattctccagtctcgagtacccagggacacaatgcactgtggaaggctgcagggccctctgcccaataaagcctgggtattgtgcaaggtttctccccactgagacagcctgagatatggcctcgtgggaagggaaagacctgaccatcccccagcccgatactcgtaaagggtctgtgctgaggaggattagtgaaagaggaaagcctctttgcagttgagataagatgaaggcatctgtctcctgcttgtcccggggaatggaatgtcttggtgtaaaacccaatcgtacattctatttactgagataggagaaaaccaccctatggctggaggtgagatatgctggcagcaatactgctctttactgcactgagatgtttgtgtaaagtcaaacataaatctggcctacatgcacatcaaggcacagcacctttccttaaacttatttatgacacagagacctttgctcacgttttcctgctgaccctctccccaccattaaccctacagtcctgccacatcccccacaccgagatagtagagatagtgatcaataaatactgagggaactcagagaccagtggcggcatgggtcctccatatgctgagcgccgttcccctgggcccactgttctttctctatactttgtmtctgtgtcttatttattttctcagtctctcaacccacctgacgagaaatactcacaggtgtggaggggctggcccccttcatctggtgcccaacatggggctcaaacccacgaccctgggattaagagtcccatgctctaccgactgagctagctcgtcccacctgatgagaaatacccacaggtgtggaggggctggcccccttcacttcccagctgaaattttactattaatcctcgtattagattctaatgtccccattaccatttaccattccaagactaaaatataatccttccattgagcaaattttagttagaacttttaatatgcttttgagtctttacccagtctgtcggtcaccaataatcagttcacgctgaccacgaccaattggcaccaagctatccacagccttaatgccagtctgcattggttcccgcactgaaattcgaggaatgataccgggggctttcagaccaactcgcctacgcgtcttggaaccaattggaccctgttaaaaaataaaaagaaaaaccctaagcataatcagttttgatgtttgttagwagctgcaactatatctaacgaacattaaacctacctttccatcaatagcattaccaagggcatcaactacacgacccaacagctcctcaccaactggaacgtccacaatggctcctgtcctcttcactatatctccttccttaattagtttatcatttccaaacacgacaacaccaacattgtcaggttccaagttcaaggacataccctgcacaaaagacacaaytgaacatcaatgaagctgaatgggcactcctccccatacaccaatactacataagaaaatagtcrggggktggggggggaagcagtattgtccttttcacctggtttattcttgagtacttttccaactaacaaacaaccctctctgattaagacttttaaaattgctattttgaataatcttaggacagcacattgataagcctaataygctcactatcatatcctcaaataactattacagaagcaaagaaattggacaggttaataagcttttttccactgtattttctttggcaatgattcttgggctgggtgatcagtatgaaataaagtgatgaaggccaaatggaaatcttaagacaaatttgattatcatcttatttatgtgtgagaagctccataaacagtttcaaaaattaatcaaaacctgtactcttygagttagtagaaagtgaaattaaaagctacctaactgtaaccaatcaaatacaaattttcataacataacagcaccaaatcatctctcatcattaaaactatattttagatctttaaatcatgtctgaagcaaaaaggctattccaggaatagtctggtcaataatgaaaactctggagaagtacttggagtatcatggaatatcattacacatccaaaaactttaacctacatctctgatgttcaatacagcatccactaaccacatgtggctatttaaatttgtcaaatttaaaagattaaaaattcagttcctgtcacactagccacattttacatgattaatagtgatagtatagtaggtaccatattaaacagcacagatgtattctcatcactgcagaatactacatatttccaatactactggacagtactgttctagacacttggatttcaaaagctaaaaggggaactcagaattaatctgtttcgacctcacctttcaaagataaatactgtacactgaagatgctaaattggccaatgtcttacagctaatgataaytttgggctctgtaattattcttccacatcaagtggctctttttccgtagtagacattaccaagagtatcaagactatcttttcccatatctgcatgcctactagacagttccactctctctagtttatccagatgtcatcctctgctttccctaactcctacaacttatttctcataccctgacagatgaggctcaacccaatacaaagtagacttacattagagagcttctgatagctacaccaaaactckcctttgaacaatatgtctactcactagaaatacaaagtcacggacttccaatttccaccagaaaaattttgttgaagttatcaaatgctttgcttttgtataaaataatcttaacagcaagacagaacagacttaaacttcttggatttggggtgaaagyttattsaattttatattttggagccagtggctacaagttatgtataaatcagtccctagagtaaaaaaacttggctaattcaaacccttaagtttattctctttacaatctatgataataacaagaaaaaaatctgaggcaaattaagacaaagttttttaaaaatctgatacaatctttgaatcgctaaatgaataactgagaagacttagatcctaaaacaccaaaatcttattttataatttacctttaagcctgaagaaaactctaccatttcttctgcttgaacattcctcagcccatgtacgcgggcaataccatcaccaatacttaagacacgcccagtttcttcaagatcaacagaggtatcagctccaagaatacgctcttcaagaatagaggacatctcagcagtccctayggaagacaattcaattcaattaaaaaaataatctgggccaggcacagtggctcacagctgtaatcccagcacttttggaggctgaggcaggcagatcacctaagggcaggagtttgagaccagcctgaccaacatggagaaccctgtctctactaaaaatacaaaattagctgggcatggtggcacatgcctgyaatcccagctactcgggaggcggaggctgaggcagaagaatcrcttgaacmcaggaggcggaggttgcggtgagctgaaatcacaccattgcactcaagcctgggtaacaagggcaaaaactccatctcaaaataataataataataataataataataataataataataataataataataaaaatctggtcctcggatcttttcaaagcccatttctcaacaacaaaaaactagttttgtgatcataataatccaaatatattctacagacccagcacagtggctcacgctagccacagtggtaatgctagcactttaggaggctgaggcaggcagatcacttgaggtaaggagttcgagaccagcctggccaacattgtgaaaccccgtctccactaaaaataaaaaaaaaattagctgggcacgggcatgcctgtagtcccagctactcaggaggctgagacagaagaactgcttgaacctgggaggtggaagtcacagtaagccaagattgtgtcactgcactccagcataggtgacaaagtgagactatcacacacacaaaaattatatatatatatatatattctacactgtaacacgagattctatttttaaaagctatgaaaataaaaccaagtgattaaggaaaaaaaagtccacacaaaacaaatgtaaaccagacaagaagctaatcaaattaagtaaaacccttaaaataaatgttctcctttaatttctaagaaatctgtaactatgttaaaacctgaatttttggctaaattcaataaaaacatattttaaaaaccaactgttggccaggcacggtagatcatgcctgtaaaaccagcactttgggatgccaaagggggtggatcacttgaggccaggagttcgagaccagcctgggcaacatggtgaaacccccatctctactaaaaacacaaaagtttgccgggcatggtggtgcatgcctgtaatcccagctacttgggtggctgaggcacgagaatcacttgaacctgggagaaggaggttgcagtgagctgagatagccccactgcactccagcctggagacagagcaagactctatctcaaaaaaataaaaaataaaaaataaaaatcaactgttaacaaagtgtgtctttctctttcaaggcacacagggtagtataggtggtattcttcatcttagcatacaggggttgggtgcagtggctcacgccagtaataccagcactttgggaggcgggcggaccacttgaggccaagagtttggaccagcctggccaacacagcaaaatcccatctctactaaggraaaaaaaaaaaaaaattagccagctgtggtggtgcatgcttgtaataccagctactcgggaggctgaggcaggagagaatcactcaaacccaggaggtggagggtccagtgagccaagactacgctactgcaccccagcttgggcaacagagcgaaactctgtctcaaaaaacaaaacaaaacaaaataaaaaaacatcccagcactttgggaggccaaggtagacggatcccctggggtcagggctttgagatcagccaggccaacatggcgaaactctatctctactaaaaatacaaaaattagccaggtgtggtggtgcgtgcctgtaatcctagccactagggaagctgactcaggagaatcacttgaacctgggaggtggaggttgcagtgagctgagatggcgcaactgcactccagcttgggcaacagagtctcaaaaaaaaggaggccacgcacagtgcctcatgtctgtaatcccaccactttgggaggccaaggcaggtggatcacctgaggtcaggagttcgagaccagcctggctaacatggtgaaaccttgtctctacaaaaaatacaaaaattagctgggtgtggtggtgggcacctgtaatcccacctactcgggaggctgaggcaggagaatcacttgaacccgtgaggcagaggctgcagtgagcccagatcatgccactgcactccagcctgggcaacaagagcaaaactccatctcaaaaaaaaaagaaaaaagaaaaacatatatgctgaacgtgggggtgtgtgtacacatacacacacacacacacacacayayayacacacacactctcacacacatatatatttaacctttattttaaaagtccaaatactcatctccaaagaaattccccaacttatagtgtcttcctatgcttgcctccccacttctctactgcatctgtaatgtgcaagttcacagattgccaaatatctagtagctactgcctttgaaaaaataaaacctatcagtggaccggtgcagtggctcacgcctttaatcccagcactttgggaggccgaggcaggcatatcacaaggtcaggagatcgagaccatcctggccaacatggtgaaaccttgtctctactaaaatacaaaaaattagccgggcatggtggtgcatgcctgtaatcccagctagtcaggagactgaggcagtagaattgcttgaactcaggagacagaggttgcagtgagccgagatcttgccactgcactccagcctggcgacagagcaagattctgtctcaaaaaaaaagaaaamgaataagaaaacctatcaataagaacttacattttttctaatgccttttagaaaaggaaaaaggaagtcttccagaggtcacaaagattccattacctagtgtatgttctttctgtttctacccaagggccattaccagaacaaagaagccatactaatatcaaaagaaaaatatgtaacagtagttcatttgactataacaagagaaccatgacagggctaaatggtaacawtatggtttaagaacctgagagtctatacaaactagagaaaaaactaacaaatgaaaaacaactcaccacagttatacgatgtatgtaatttatatcttcatctagtaagtgcggcgtagactgagaaataataacttaccagtcttttgaagatgagtgttagaggcatggaagttccttgcagcaatgaaagatgaacccaaagcatttctggagacctagtgcaaaagtattcttaaaaatttgatttttaacaaagcctttataaaacttacaagcttaaacaaatgccagcttagtgtgatcaaagtactggtgaaaatgctaattacatataaagcattttgtttaaaatgtcaaatgggaaagtagcttttgatatatgtgaaaaccttttatacagctcctagtacacagtaaacactcgcatatttttaaaatgcagtctgtactttattattattgkttttttgagacggctcactgcatcctccacctcctagtctcaagcgattctcagcctcccgagtagctgggactacaggggtgcgccacctccaccaggttaattttttatatttttagtagagacggggtttcaccatgctggccaggctggtctcgaactcctgacctcaagtgatccacccgccttggcctcccaaagtgctagaactataggcgtgagcaccgcacccggcttatttttttttcttttttgggacagggtctcactcttgtcacccaggtcggagtgcagtggctcaatcacggctcactacagcctcgacttcctgggctcaggtgatcctcccacctcagcctccccagtaggtgggatcacaggagtgcgccacctggccaggctaatttttgtacttattttttttatagagacaggatttcatcatattgcccagactgggcagtaaatatatatatacacacacattttttttttccttctgagacggagtctcattctgtcacccaagctggagtgcaggggcacgatcttggctcattgcaaccttcacctcccaggttcaagcgattctcatgcctcggcctcctgagtagctgggactacaggcgaccaccaccatgcccggctaatttttttatttttagtagagacagggtttcgccatgttggccaggttgatctcgaactcctgacttcaggtgatgcacccaccttggcctcccaaagtgctggaattacagacgtcagccactgcacccggcctggcagtcagtattttaaaaagcaactattggcagggcacggtggctcatgcctgtaatcccagcactttgggaggccaaggcgggcggattacctaaggtcgggagttggagaccagcctgaccaacatggagaaaccccgtctctactagaaatacaaaattagctgggcgtggtggcacatgcctgtaatcccagctactcgggaagctgaggcaggagaatcgcttgaacctgggaggcagaggttgtggtgagccaagatcgcgccactgcactccagcctgggcgacaaaagcaaaactccgtctcaaaaaaaaaaaaaaaaagcaactgttaacaaaatgtaagtgtctttccctttaaaggtacccaatttttattattttgactttagatgtattttaatggagttgcaggaattctaagataaacagcttcctacaaggggcaaaactcaaagtagttccaattttacttaaaaacaacaacaacaacaacgacaacaagcggccgggcacgacggctcatgcttgtaatcccagcacttcagaaggccgaggcgrgcggatcacctgacgtcaggagttcaagaccagcctagccaacatggtgaaaccccgtctctacgaaaaactacaaaaagtagcagggcatgacggcgggtgcctgtaatcccagctactcgggaggctgaggtgggagaatcacttgatcctgggaggcggtggttgcagtgggcggagatcacgccattgcartccagcctgggcgactgagcgagacaccatctcaaaaaaaaaaaaaaaaaaaaamcargcaaacaaaaactgaataaatgctagagttagattagaaaccaagagttgtggcatgtggacttattttactctctcaacaaatcctgcagccacctggaacttccttcagtttctccttcaagttgtaatactgcgactggtcactgtcaattctgaagcctctaccttccatargagctagatgaaaaccgttaaaaatgcttttttgttaacagaaacccaagatgctaccagcggttgttaaggcagcaaaacagccaacatgtttatttcacctttcaaattgagattacttttagaacaaaaaaaaagtgtcagtgtcaatgcgtttacactgaaatcatgttaatttcaagggaaacaaataacgaagggtattaatccttacagccattttccaaccttgttctcttttacttgaattctccatcactaaaaattactcaaaaccaggtggaaaactcaaggacaaattctttaaacacgtccaagtgccacaaagcacacactctgccggagagacaatttagaaaccagcttcactgttgtcacagtgctggccacatgaaatggttctttgcacctgcaggacgttttcacggtcgtttcgtattcagcactaagagaaagcctacgtaagtattccaaaaaccaccttcatttattcctttcctctaaactgagctccaggcagaggtgaaatgctgggcctgctgaccttcacacaatgtcagactccactgactagcttcaacaagagctgacagcagttttctgaccttcagcgggacgcgaccctaagaatcgaaagagagraacctcaccgattcagaacaggcctcggagagctagcgcccaagccctgaccttcacccaagatcccccttctagggccgctgtcagccgaagrcaggaatcttgaggccctgtctctggacaccatcgagttaactgtctgccctgtaccattctgcctctgcgcaggtgacgagcaaaagggcacctgtgtcgcctgctctgtccagccggagaagccacgggtgcaaratggcggcatycgccacagcccctcgccctcctgcagagagcgcccgagccggcgcaccaccaccctgcagccccacccggccgcctgcatcatgccggccttcggtgctcaccagtccggcccgccgaggaagggcgcggaccacggccgcagcaacgcgcacggacagcatctttgcagttactccgcaggcggtacttctgmagccgcagcctccggactgactgggacaaaatggccgagccgcaaagaaggtcaagacagccggcccacctgacccggaagtactgcccctcgcgttcaccacctctccccccgcccccgccgccactctgcattttttggcaggttacttatttttttatgtaacatttttaagtttaaacctcaaaatgaatgattagatatattccggctttggtcctggcattcgttatacatttattttggtcttttgagtcgaccttgtggttgccccgggtgaccacgtgggtagctgaatctgctaagcagcagttcccaggccccatctggtgctagaggatgagggcctcacccgtctggggtcgcggctgtcttgaggaccagggcgattaatagtgtcggtagtgttagaccgtggtttagcacgagtagcaacagtgaacagctaaaccccgggactggccaccagcagggagyctcccacggagcccgttaatctgcagatcttagccccacttcagaccctctgagtcgaaaattcggggcaatctgaatttttaacaaacaccagcaccgttccacgtgatccgatctgcgctcaggttaaagattcccagcttttttagattcattctaaaagaatcctgtcagtgaattagagcaaactgtttaaaaatcctgrtaaccgggggaggggagcatcaagataaatagctaatacatgcggagcttaatacctaggtgatgggatgatagttacagcaaaccaccatggcacacatttacctgtgtaacaaacctgcacgtcctggacatgtattccggaactttaaattaaaaaaaatatatcaacaatcacaaggaggcctagaagagtcattgccaatcctactgagaattgtccagaatcagaagtttacaccaggataggacgaggactcgctttttcctctgccaacatctagttcatgctattgggaactctgcttcttcatttggagtcaaagggagatgatgaaaaaacactttctatgcttacctggatgggctttttttttttctccacagaattaccatactgagattttkgtgatatatgcaagattbgtgtgtgtgtgtgatgctggttattattatgtcatagtggacacttattaacgttgccttcacttttcttttttttttatttatttattttattttatttaagacagggtctcactctgttgcccaggaaagagtgcagtgggtttatcaccattcattgcagcctggaactcctgggctggagcaatcctctgacctcagcctgtgcccctgtggtcccaccaccatgcctggctaatttttttgtaaagacggcggtggtgggcagggcgtggggggaggtctctctatgttgcccaggctggtctcgaactcctggcttcaagtgatccttcctcctcagcctctgcgctgggcccgcttttcaccgtttggagaagcattttcagttccatcccccaaatcctggcttacacctagaacctgaattttggtgaggcaaataaatatccgggctacaagggtcatctcctgaaacatggcttgtaaacacgtgattagccatccttttctctagtatcctactcttttcaaggtaagccatgggaaaatagagcagcagttctcctgggaatcaggggtacaaaaaggctgtccaagccaggcgcagtggctcacgcctgtaatcccagcactttgggaggctgaggcgggtggatcacctgaggtcaggagttcgagaccagcttggccaacatggcaaaaccccatctctactaaaaatacaaaaattagccmggcatgggggcgggcacctgtaatcccagctactggggaggctgaggcaggagaattgctttaacccgggaggcagaagttgcagtgagccccagattgcaccactgtcctccagcctgggcaataaaagtgaaactccatctaaaaaaaaaaaaaaaaaaaaagaaagaaaaaaagaaaagaaaaagaaaaaggctgtccaagtaaaataaaatacagagacaaatctmtaaatttaaaacatttgggaagcaataattgccattcagggcatacacacaaacagggtggtctttggtacgtcagaagaacaaacagatggttagaggttttatttttgtaaaagagaaatatagccaggaacagtggctcatgcctgtaatcccaacacgttgggaagccaagatgagaggttcacttgagcccaggagtttgggagtgcagtgagctgtgatcacaccggaacactccagcctgggcaacaaagcaagaccctatatcaaaacaaacaacaaaaaaagagaactgttgtatattgttctttaagaaagttcattgtcactagtaaggttttggggagctggcaagttttgattggcaagtaatggcaactaggtaaaacratycttagagtcactgcaggttgtttttagcagctaattagataaaactggtttaggtcagccrggcacggtggctcacgcctgtaatcccagcgctttgggaggccgaggcgggtggatcacctgaggtcaggagttcaagaccagcctgaccaacatgatgaaaccccgtctctgctaaaaatacaaaaattggctgggtatgttggcgggtgcctgtaatcccagctacttgggaggctgaggcaggagaatcacatgaacctggaggcagaggttgcagtgagccaaaatcatgccattgcattccagcctgggcgacagagtgagactccatctcaaaacaaacaaacaaaaaaactggtttaggttatagcgggcagtttcagcagccaggcttacagataattacatttttggagcaatgttatgtgccctgagtgcttttttttccctttacctcttgacactgttttagttggggatgacaagaatgacccaatcaactttcacaagctaacaggaaaaaatatsgtttctaaaaacaacaaggccgggcatggtggctcacgcatgtaatcctagcacattgggaggccaaggcaggcagatcgcctgaggtcaggagttcaagaccagcctggccaacatggcaaaaccccgtctctactaaaaaatcaaaaattagctgggggtggtggtgcacacctgtaaccccagctactcaggaggctgaggaaggagaatcgcttgaayccaggaggtgaaggttgcagtgagccaggtggaggttgcagtgagccaagattgcgcctctgcacttcagtatgcgcgacaggagtgagactatctcaaaacaacaacaacaataacaacaaaattagccggcatggtggctcacacctgtaatcccagcactttgggaggctgaagcaggttgatcacttgaagtcaggagttcaagatgagtctggccaacatatcgagatccctgcaccccctgccccatctttagctgggcatggtggcacatgcctgtaatcccagctatttaggaggctgaggcacgagaatcacttaaacctgggagatggaggttgcagtgaccactgcactccagcttgggcaacacagtgagattctgtctgaaaaaaaaaaaaaggccgggcatggtggctcatgcctgtaatcccagcacgttgggaggccgaggcgggcggatcacaaggtcaggcgatcaagtaccatcctggctaacacggtgaaatcccgtctctactaaaaatacaaaaaattagccgggcatggtggcgggcgcctgtagtcccagctgcttgggaggctgaggcaggagaatggcatgaacctgggaggtggagcttgcaggggtgctgagatcgcgcaactgcactctagcnnnnnnnnnnnnnnnnnnnnnnnnnnnnnnnnnnnnnnnnnnnnnnnnnnnnnnnnnnnnnnnnnnnnnnnnnnnnnnnnnnnnnnnnnnnnnnnnnnnnnnnnnnnnnnnnnnnnnnnnnnnnnnnnnnnnnnnnnnnnnnnnnnnnnnnnnnnnnnnnnnnnnnnnnnnnnnnnnnnnnnnnnnnnnnnnnnnnnnnnnnnnnnnnnnnnnnnnnnnnnnnnnnnnnnnnnnnnnnnnnnnnnnnnnnnnnnnnnnnnnnnnnnnnnnnnnnnnnnnnnnnnnnnnnnnnnnnnnnnnnnnnnnnnnnnnnnnnnnnnnnnnnnnnnnnnnnnnnnnnnnnnnnnnnnnnnnnnnnnnnnnnnnnnnnnnnnnnnnnnnnnnnnnnnnnnnnnnnnnnnnnnnnnnnnnnnnnnnnnnnnnnnnnnnnnnnnnnnnnnnnnnnnnnnnnnnnnnnnnnnnnnnnnnnnnnnnnnnnnnnnnnnnnnnnnnnnnnnnnnnnnnnnnnnnnnnnnnnnnnnnnnnnnnnnnnnnnnnnnnnnnnnnnnnnnnnnnnnnnnnnnnnnnnnnnnnnnnnnnnnnnnnnnnnnnnnnnnnnnnnnnnnnnnnnnnnnnnnnnnnnnnnnnnnnnnnnnnnnnnnnnnnnnnnnnnnnnnnnnnnnnnnnnnnnnnnnnnnnnnnnnnnnnnnnnnnnnnnnnnnnnnnnnnnnnnnnnnnnnnnnnnnnnnnnnnnnnnnnnnnnnnnnnnnnnnnnnnnnnnnnnnnnnnnnnnnnnnnnnnnnnnnnnnnnnnnnnnnnnnnnnnnnnnnnnnnnnnnnnnnnnnnnnnnnnnnnnnnnnnnnnnnnnnnnnnnnnnnnnnnnnnnnnnnnnnnnnnnnnnnnnnnnnnnnnnnnnnnnnnnnnnnnnnnnnnnnnnnnnnnnnnnnnnnnnnnnnnnnnnnnnnnnnnnnnnnnnnnnnnnnnnnnnnnnnnnnnnnnnnnnnnnnnnnnnnnnnnnnnnnnnnnnnnnnnnnnnnnnnnnnnnnnnnnnnnnnnnnnnnnnnnnnnnnnnnnnnnnnnnnnnnnnnnnnnnnnnnnnnnnnnnnnnnnnnnnnnnnnnnnnnnnnnnnnnnnnnnnnnnnnnnnnnnnnnnnnnnnnnnnnnnnnnnnnnnnnnnnnnnnnnnnnnnnnnnnnnnnnnnnnnnnnnnnnnnnnnnnnnnnnnnnnnnnnnnnnnnnnnnnnnnnnnnnnnnnnnnnnnnnnnnnnnnnnnnnnnnnnnnnnnnnnnnnnnnnnnnnnnnnnnnnnnnnnnnnnnnnnnnnnnnnnnnnnnnnnnnnnnnnnnnnnnnnnnnnnnnnnnnnnnnnnnnnnnnnnnnnnnnnnnnnnnnnnnnnnnnnnnnnnnnnnnnnnnnnnnnnnnnnnnnnnnnnnnnnnnnnnnnnnnnnnnnnnnnnnnnnnnnnnnnnnnnnnnnnnnnnnnnnnnnnnnnnnnnnnnnnnnnnnnnnnnnnnnnnnnnnnnnnnnnnnnnnnnnnnnnnnnnnnnnnnnnnnnnnnnnnnnnnnnnnnnnnnnnnnnnnnnnnnnnnnnnnnnnnnnnnnnnnnnnnnnnnnnnnnnnnnnnnnnnnnnnnnnnnnnnnnnnnnnnnnnnnnnnnnnnnnnnnnnnnnnnnnnnnnnnnnnnnnnnnnnnnnnnnnnnnnnnnnnnnnnnnnnnnnnnnnnnnnnnnnnnnnnnnnnnnnnnnnnnnnnnnnnnnnnnnnnnnnnnnnnnnnnnnnnnnnnnnnnnnnnnnnnnnnnnnnnnnnnnnnnnnnnnnnnnnnnnnnnnnnnnnnnnnnnnnnnnnnnnnnnnnnnnnnnnnnnnnnnnnnnnnnnnnnnnnnnnnnnnnnnnnnnnnnnnnnnnnnnnnnnnnnnnnnnnnnnnnnnnnnnnnnnnnnnnnnnnnnnnnnnnnnnnnnnnnnnnnnnnnnnnnnnnnnnnnnnnnnnnnnnnnnnnnnnnnnnnnnnnnnnnnnnnnnnnnnnnnnnnnnnnnnnnnnnnnnnnnnnnnnnnnnnnnnnnnnnnnnnnnnnnnnnnnnnnnnnnnnnnnnnnnnnnnnnnnnnnnnnnnnnnnnnnnnnnnnnnnnnnnnnnnnnnnnnnnnnnnnnnnnnnnnnnnnnnnnnnnnnnnnnnnnnnnnnnnnnnnnnnnnnnnnnnnnnnnnnnnnnnnnnnnnnnnnnnnnnnnnnnnnnnnnnnnnnnnnnnnnnnnnnnnnnnnnnnnnnnnnnnnnnnnnnnnnnnnnnnnnnnnnnnnnnnnnnnnnnnnnnnnnnnnnnnnnnnnnnnnnnnnnnnnnnnnnnnnnnnnnnnnnnnnnnnnnnnnnnnnnnnnnnnnnnnnnnnnnnnnnnnnnnnnnnnnnnnnnnnnnnnnnnnnnnnnnnnnnnnnnnnnnnnnnnnnnnnnnnnnnnnnnnnnnnnnnnnnnnnnnnnnnnnnnnnnnnnnnnnnnnnnnnnnnnnnnnnnnnnnnnnnnnnnnnnnnnnnnnnnnnnnnnnnnnnnnnnnnnnnnnnnnnnnnnnnnnnnnnnnnnnnnnnnnnnnnnnnnnnnnnnnnnnnnnnnnnnnnnnnnnnnnnnnnnnnnnnnnnnnnnnnnnnnnnnnnnnnnnnnnnnnnnnnnnnnnnnnnnnnnnnnnnnnnnnnnnnnnnnnnnnnnnnnnnnnnnnnnnnnnnnnnnnnnnnnnnnnnnnnnnnnnnnnnnnnnnnnnnnnnnnnnnnnnnnnnnnnnnnnnnnnnnnnnnnnnnnnnnnnnnnnnnnnnnnnnnnnnnnnnnnnnnnnnnnnnnnnnnnnnnnnnnnnnnnnnnnnnnnnnnnnnnnnnnnnnnnnnnnnnnnnnnnnnnnnnnnnnnnnnnnnnnnnnnnnnnnnnnnnnnnnnnnnnnnnnnnnnnnnnnnnnnnnnnnnnnnnnnnnnnnnnnnnnnnnnnnnnnnnnnnnnnnnnnnnnnnnnnnnnnnnnnnnnnnnnnnnnnnnnnnnnnnnnnnnnnnnnnnnnnnnnnnnnnnnnnnnnnnnnnnnnnnnnnnnnnnnnnnnnnnnnnnnnnnnnnnnnnnnnnnnnnnnnnnnnnnnnnnnnnnnnnnnnnnnnnnnnnnnnnnnnnnnnnnnnnnnnnnnnnnnnnnnnnnnnnnnnnnnnnnnnnnnnnnnnnnnnnnnnnnnnnnnnnnnnnnnnnnnnnnnnnnnnnnnnnnnnnnnnnnnnnnnnnnnnnnnnnnnnnnnnnnnnnnnnnnnnnnnnnnnnnnnnnnnnnnnnnnnnnnnnnnnnnnnnnnnnnnnnnnnnnnnnnnnnnnnnnnnnnnnnnnnnnnnnnnnnnnnnnnnnnnnnnnnnnnnnnnnnnnnnnnnnnnnnnnnnnnnnnnnnnnnnnnnnnnnnnnnnnnnnnnnnnnnnnnnnnnnnnnnnnnnnnnnnnnnnnnnnnnnnnnnnnnnnnnnnnnnnnnnnnnnnnnnnnnnnnnnnnnnnnnnnnnnnnnnnnnnnnnnnnnnnnnnnnnnnnnnnnnnnnnnnnnnnnnnnnnnnnnnnnnnnnnnnnnnnnnnnnnnnnnnnnnnnnnnnnnnnnnnnnnnnnnnnnnnnnnnnnnnnnnnnnnnnnnnnnnnnnnnnnnnnnnnnnnnnnnnnnnnnnnnnnnnnnnnnnnnnnnnnnnnnnnnnnnnnnnnnnnnnnnnnnnnnnnnnnnnnnnnnnnnnnnnnnnnnnnnnnnnnnnnnnnnnnnnnnnnnnnnnnnnnnnnnnnnnnnnnnnnnnnnnnnnnnnnnnnnnnnnnnnnnnnnnnnnnnnnnnnnnnnnnnnnnnnnnnnnnnnnnnnnnnnnnnnnnnnnnnnnnnnnnnnnnnnnnnnnnnnnnnnnnnnnnnnnnnnnnnnnnnnnnnnnnnnnnnnnnnnnnnnnnnnnnnnnnnnnnnnnnnnnnnnnnnnnnnnnnnnnnnnnnnnnnnnnnnnnnnnnnnnnnnnnnnnnnnnnnnnnnnnnnnnnnnnnnnnnnnnnnnnnnnnnnnnnnnnnnnnnnnnnnnnnnnnnnnnnnnnnnnnnnnnnnnnnnnnnnnnnnnnnnnnnnnnnnnnnnnnnnnnnnnnnnnnnnnnnnnnnnnnnnnnnnnnnnnnnnnnnnnnnnnnnnnnnnnnnnnnnnnnnnnnnnnnnnnnnnnnnnnnnnnnnnnnnnnnnnnnnnnnnnnnnnnnnnnnnnnnnnnnnnnnnnnnnnnnnnnnnnnnnnnnnnnnnnnnnnnnnnnnnnnnnnnnnnnnnnnnnnnnnnnnnnnnnnnnnnnnnnnnnnnnnnnnnnnnnnnnnnnnnnnnnnnnnnnnnnnnnnnnnnnnnnnnnnnnnnnnnnnnnnnnnnnnnnnnnnnnnnnnnnnnnnnnnnnnnnnnnnnnnnnnnnnnnnnnnnnnnnnnnnnnnnnnnnnnnnnnnnnnnnnnnnnnnnnnnnnnnnnnnnnnnnnnnnnnnnnnnnnnnnnnnnnnnnnnnnnnnnnnnnnnnnnnnnnnnnnnnnnnnnnnnnnnnnnnnnnnnnnnnnnnnnnnnnnnnnnnnnnnnnnnnnnnnnnnnnnnnnnnnnnnnnnnnnnnnnnnnnnnnnnnnnnnnnnnnnnnnnnnnnnnnnnnnnnnnnnnnnnnnnnnnnnnnnnnnnnnnnnnnnnnnnnnnnnnnnnnnnnnnnnnnnnnnnnnnnnnnnnnnnnnnnnnnnnnnnnnnnnnnnnnnnnnnnnnnnnnnnnnnnnnnnnnnnnnnnnnnnnnnnnnnnnnnnnnnnnnnnnnnnnnnnnnnnnnnnnnnnnnnnnnnnnnnnnnnnnnnnnnnnnnnnnnnnnnnnnnnnnnnnnnnnnnnnnnnnnnnnnnnnnnnnnnnnnnnnnnnnnnnnnnnnnnnnnnnnnnnnnnnnnnnnnnnnnnnnnnnnnnnnnnnnnnnnnnnnnnnnnnnnnnnnnnnnnnnnnnnnnnnnnnnnnnnnnnnnnnnnnnnnnnnnnnnnnnnnnnnnnnnnnnnnnnnnnnnnnnnnnnnnnnnnnnnnnnnnnnnnnnnnnnnnnnnnnnnnnnnnnnnnnnnnnnnnnnnnnnnnnnnnnnnnnnnnnnnnnnnnnnnnnnnnnnnnnnnnnnnnnnnnnnnnnnnnnnnnnnnnnnnnnnnnnnnnnnnnnnnnnnnnnnnnnnnnnnnnnnnnnnnnnnnnnnnnnnnnnnnnnnnnnnnnnnnnnnnnnnnnnnnnnnnnnnnnnnnnnnnnnnnnnnnnnnnnnnnnnnnnnnnnnnnnnnnnnnnnnnnnnnnnnnnnnnnnnnnnnnnnnnnnnnnnnnnnnnnnnnnnnnnnnnnnnnnnnnnnnnnnnnnnnnnnnnnnnnnnnnnnnnnnnnnnnnnnnnnnnnnnnnnnnnnnnnnnnnnnnnnnnnnnnnnnnnnnnnnnnnnnnnnnnnnnnnnnnnnnnnnnnnnnnnnnnnnnnnnnnnnnnnnnnnnnnnnnnnnnnnnnnnnnnnnnnnnnnnnnnnnnnnnnnnnnnnnnnnnnnnnnnnnnnnnnnnnnnnnnnnnnnnnnnnnnnnnnnnnnnnnnnnnnnnnnnnnnnnnnnnnnnnnnnnnnnnnnnnnnnnnnnnnnnnnnnnnnnnnnnnnnnnnnnnnnnnnnnnnnnnnnnnnnnnnnnnnnnnnnnnnnnnnnnnnnnnnnnnnnnnnnnnnnnnnnnnnnnnnnnnnnnnnnnnnnnnnnnnnnnnnnnnnnnnnnnnnnnnnnnnnnnnnnnnnnnnnnnnnnnnnnnnnnnnnnnnnnnnnnnnnnnnnnnnnnnnnnnnnnnnnnnnnnnnnnnnnnnnnnnnnnnnnnnnnnnnnnnnnnnnnnnnnnnnnnnnnnnnnnnnnnnnnnnnnnnnnnnnnnnnnnnnnnnnnnnnnnnnnnnnnnnnnnnnnnnnnnnnnnnnnnnnnnnnnnnnnnnnnnnnnnnnnnnnnnnnnnnnnnnnnnnnnnnnnnnnnnnnnnnnnnnnnnnnnnnnnnnnnnnnnnnnnnnnnnnnnnnnnnnnnnnnnnnnnnnnnnnnnnnnnnnnnnnnnnnnnnnnnnnnnnnnnnnnnnnnnnnnnnnnnnnnnnnnnnnnnnnnnnnnnnnnnnnnnnnnnnnnnnnnnnnnnnnnnnnnnnnnnnnnnnnnnnnnnnnnnnnnnnnnnnnnnnnnnnnnnnnnnnnnnnnnnnnnnnnnnnnnnnnnnnnnnnnnnnnnnnnnnnnnnnnnnnnnnnnnnnnnnnnnnnnnnnnnnnnnnnnnnnnnnnnnnnnnnnnnnnnnnnnnnnnnnnnnnnnnnnnnnnnnnnnnnnnnnnnnnnnnnnnnnnnnnnnnnnnnnnnnnnnnnnnnnnnnnnnnnnnnnnnnnnnnnnnnnnnnnnnnnnnnnnnnnnnnnnnnnnnnnnnnnnnnnnnnnnnnnnnnnnnnnnnnnnnnnnnnnnnnnnnnnnnnnnnnnnnnnnnnnnnnnnnnnnnnnnnnnnnnnnnnnnnnnnnnnnnnnnnnnnnnnnnnnnnnnnnnnnnnnnnnnnnnnnnnnnnnnnnnnnnnnnnnnnnnnnnnnnnnnnnnnnnnnnnnnnnnnnnnnnnnnnnnnnnnnnnnnnnnnnnnnnnnnnnnnnnnnnnnnnnnnnnnnnnnnnnnnnnnnnnnnnnnnnnnnnnnnnnnnnnnnnnnnnnnnnnnnnnnnnnnnnnnnnnnnnnnnnnnnnnnnnnnnnnnnnnnnnnnnnnnnnnnnnnnnnnnnnnnnnnnnnnnnnnnnnnnnnnnnnnnnnnnnnnnnnnnnnnnnnnnnnnnnnnnnnnnnnnnnnnnnnnnnnnnnnnnnnnnnnnnnnnnnnnnnnnnnnnnnnnnnnnnnnnnnnnnnnnnnnnnnnnnnnnnnnnnnnnnnnnnnnnnnnnnnnnnnnnnnnnnnnnnnnnnnnnnnnnnnnnnnnnnnnnnnnnnnnnnnnnnnnnnnnnnnnnnnnnnnnnnnnnnnnnnnnnnnnnnnnnnnnnnnnnnnnnnnnnnnnnnnnnnnnnnnnnnnnnnnnnnnnnnnnnnnnnnnnnnnnnnnnnnnnnnnnnnnnnnnnnnnnnnnnnnnnnnnnnnnnnnnnnnnnnnnnnnnnnnnnnnnnnnnnnnnnnnnnnnnnnnnnnnnnnnnnnnnnnnnnnnnnnnnnnnnnnnnnnnnnnnnnnnnnnnnnnnnnnnnnnnnnnnnnnnnnnnnnnnnnnnnnnnnnnnnnnnnnnnnnnnnnnnnnnnnnnnnnnnnnnnnnnnnnnnnnnnnnnnnnnnnnnnnnnnnnnnnnnnnnnnnnnnnnnnnnnnnnnnnnnnnnnnnnnnnnnnnnnnnnnnnnnnnnnnnnnnnnnnnnnnnnnnnnnnnnnnnnnnnnnnnnnnnnnnnnnnnnnnnnnnnnnnnnnnnnnnnnnnnnnnnnnnnnnnnnnnnnnnnnnnnnnnnnnnnnnnnnnnnnnnnnnnnnnnnnnnnnnnnnnnnnnnnnnnnnnnnnnnnnnnnnnnnnnnnnnnnnnnnnnnnnnnnnnnnnnnnnnnnnnnnnnnnnnnnnnnnnnnnnnnnnnnnnnnnnnnnnnnnnnnnnnnnnnnnnnnnnnnnnnnnnnnnnnnnnnnnnnnnnnnnnnnnnnnnnnnnnnnnnnnnnnnnnnnnnnnnnnnnnnnnnnnnnnnnnnnnnnnnnnnnnnnnnnnnnnnnnnnnnnnnnnnnnnnnnnnnnnnnnnnnnnnnnnnnnnnnnnnnnnnnnnnnnnnnnnnnnnnnnnnnnnnnnnnnnnnnnnnnnnnnnnnnnnnnnnnnnnnnnnnnnnnnnnnnnnnnnnnnnnnnnnnnnnnnnnnnnnnnnnnnnnnnnnnnnnnnnnnnnnnnnnnnnnnnnnnnnnnnnnnnnnnnnnnnnnnnnnnnnnnnnnnnnnnnnnnnnnnnnnnnnnnnnnnnnnnnnnnnnnnnnnnnnnnnnnnnnnnnnnnnnnnnnnnnnnnnnnnnnnnnnnnnnnnnnnnnnnnnnnnnnnnnnnnnnnnnnnnnnnnnnnnnnnnnnnnnnnnnnnnnnnnnnnnnnnnnnnnnnnnnnnnnnnnnnnnnnnnnnnnnnnnnnnnnnnnnnnnnnnnnnnnnnnnnnnnnnnnnnnnnnnnnnnnnnnnnnnnnnnnnnnnnnnnnnnnnnnnnnnnnnnnnnnnnnnnnnnnnnnnnnnnnnnnnnnnnnnnnnnnnnnnnnnnnnnnnnnnnnnnnnnnnnnnnnnnnnnnnnnnnnnnnnnnnnnnnnnnnnnnnnnnnnnnnnnnnnnnnnnnnnnnnnnnnnnnnnnnnnnnnnnnnnnnnnnnnnnnnnnnnnnnnnnnnnnnnnnnnnnnnnnnnnnnnnnnnnnnnnnnnnnnnnnnnnnnnnnnnnnnnnnnnnnnnnnnnnnnnnnnnnnnnnnnnnnnnnnnnnnnnnnnnnnnnnnnnnnnnnnnnnnnnnnnnnnnnnnnnnnnnnnnnnnnnnnnnnnnnnnnnnnnnnnnnnnnnnnnnnnnnnnnnnnnnnnnnnnnnnnnnnnnnnnnnnnnnnnnnnnnnnnnnnnnnnnnnnnnnnnnnnnnnnnnnnnnnnnnnnnnnnnnnnnnnnnnnnnnnnnnnnnnnnnnnnnnnnnntctttggcttccatatatatataatatatatataatgtgtatatatattccatattatatatataatatataatgtgtatatatattccatattatatataatatatataatgtgtatatatattccatattatatatataatatatataatgtgtatatattccatattatatatataatatatataatgtgtatatattccatattatatatataatatatataatgtgtatatatattccatattatatatataatatatataatgtgtatatatattccatattatatatataatatatataatgtgtatatatattccatattatatatataatatatataatgtgtatatatattccatattatatatataatatatataatgtgtatatatattccatattatatatataatatatataatgtgtatatatattccatattatatatataatatatataatgtgtatatatattccatattatatatataatatatataatgtgtatatatattccatattatatatataatatatataatgtgtatatatattccatattatatatataatatatataatgtgtatatatattccatattatatatataatatatataatgtgtatatatattccatattatatataatatatataatgtgtatatatattccatattatatatataatatatataatgtgtatatatattccatattatatatataatatatataatgtgtatatatattccatattatatatataatatatataatgtgtatatatattccatattatatatataatatatataatgtgtatatatattccatattatatataatatatataatgtgtatatatattccatattacatatatataatatatataatgtgtatatatattccatattatatatataatatatataatgggtatatattccatataatatatataatatatataatatgtatatattccatattatatatataatatatatattccatatannnnnnnnnnnnnnnnnnnnnnnnnnnnnnnnnnnnnnnnnnnnnnnnnnnnnnnnnnnnnnnnnnnnnnnnnnnnnnnnnnnnnnnnnnnnnnnnnnnnnnnnnnnnnnnnnnnnnnnnnnnnnnnnnngtctcactctgtgcccagctggagcagtggcggaatctcagctcgctgcagccttcaccttctgggtccaagcgattctcatgcctcagtctcccaagtagctgggactacaggcgtgcaacactatgcctggctaagttttgtatttttagtaaagatagggtttcaccatgttgcccaggctggtctcaaactcctgacctcaagtgatctgcctgccttggcctcccaaagtgctgggattacaggcgtgagccaccatgcccagcccataatatctttgatctatcttcaagttcacttattctttcttctgccgctgcaaatctagtgttaattctctctagtgaatttttcagttcagttattgcactctagaattcccatttagttcttttcttacaatttctttctcttcattgatattctttatttgatgcaacattgtcatcttacctcatgttccttctttaatttggtttcctttaattctgtgaacatgcttattatggatatttgaagtttttcctgataaagccaacatctkgtcattctcacaggcagcttctgttgcttgcttttttctattacagttcctgtcttattctttgcattcctcttttttgttgttgttgttgttgctggaaactggacatttcagacaacatattgtatccttgctaggtactaatcttacttcctcctgttattgttattggcttacctgtctgattgctagctggattattttaatgaagtctgtttatccccaacagagttaaactcctgatgttatcagctcctcagggagacacatacttgagtatctccaaggtcactctgagttgacagtgtttgggtcaagctgacttcctctctttcactgagcacacctgactgtaaaattccactaatttacagctgttgttttcaacaatgccctgggcataaactgctctaygagcaattccaatcaaattctagctctcttagaggaatagtttctgaggtcagttagatatttgttttatcttctggatggctctcctagatgtcttaactacaaactamttgccctacagtttagcctgtatcttgaatctgctcccaatttctttgaccacaacttctactctttttgagattgcccttaggcttgaacctttctaagctctgttgcaaatgtagtcagttcctttgggaagagatggagagccatctgttttatgacttgattttcccatgaggcaaaatctctgaacccagcctctggagttggggttggaggtaggtagggaaaatgtcaagtttgtcactgagcgatatgccagctataggaactgcttggtagagagggagtgcggcagccttaggtcctcttggcttgcctctcctggtgtggaaccaccacctcactagccggagcaagggccattgggactccagtattctcagcttgccttactcaaggagcttccattccaagagcagtggctgggcagacacacctctcaaccacatcccgctgggacttggacgcagtagcagatagctagtggcaggatgaaaaacactaaagtcttgcttctcccaggaagaaggccttccagctgggagctgggagcaaagaaagccccatgttgactgcagctgtctggagtggagtctccacctcagtgagctggaagggaggagggagggaggagtcttggttcaaataccacaaattctcagtgtccttactgagtttttatagattttattgaatagttgtttcttcatttgctgtgtacccttaggaccatttttagaggctttaaatgcttgggtttgttttctttctttcttctgattttcaccagtttcacagaagagcaggtcagcccaactcccacactattatgctggaagttgatctcctggtcaattgaattttgacaagggtgtaacaagacaattcaacggagaaaacaatagccttttcaacaaaagggacaactggatatccatatgctcaagaatgaagttggactcaaactcacacaaaatagaagaattctctcaaaatgaataaagcgcctaaaaaggccaggcacggtgtaatcccagcacttggggaggccgaggtgggtggatcacctgaggtcaggagtttgagaccagctttgccaaatggcgaaaccccatctctactaaaaatgcaaaaattagccaggcatggtggcatgtccctgtaatcccagctactagaggggctgaggcaggaggatcacttaaacctgggaggcagaggttgcagtgagccgagattgtgccactgcactccagcctgggaaacagagtgagactgcatctcaaaaaaaaaaaaaaaaaaaattagcyaggggtggtggtgcaygcctgtagtcccagctacttgggaggctgaggtgggaggattgcttgagcccgggaagcagaggttgcagtgagccaatatcgtgccactgcactccagcttgggtgacagagtgagaccctgcctcaaaaaaaaagcctaaaaaatatgagctaaacctaaaatgcatagaaggcaacaaaggtatatacccttgtaaccttggatttggcattggtttcttggatatgatgccaaaagcacaagcaaacaaaataaaaagtatataaattagacatcatsaraatttaaaacttttgttctcaaaggacaccatcaagaatatgaaaagacaggctgggcattgtggctcacacctataatctcagcacttcgggaggctgaggcaggtggatcacctgagtctcaagttcaagaccagcctggccaaccctgtctctactaaaaatacaaaaattagctgggtgtggtggcacatgcctgtaatcccatctacttgggaggctgaggcatgagaatcacttgaacctgggaggcagaggttgcagtgaaccgagatcgtgccactgcactccagcctgagcaacagagcgagactgtctcagaaaaagggaagggaaggggaggggagggggaaaaaggaaagaaagaaagggaagaaaggaaagaaagaatatgaaaagagacagtcctcagaatgggagaaaatatttgtaaatatatctgatatgggacttgtatctacaacatgtaaagaactcttacaactcaataataaagcctgggcacagtggctcacacctgtaatcccaccactttgggaggcygaggcagacagactgcttgagcccaggagtttgaggtcagcctaggcaacatggcgaaactacatctctaaaaaattaccaaaattagccaggcatggtggtgcacacctgtagtctcagctacctgggaggctgaggtgggaggatcacttgagcccagcaggtggaggttgcagtgagctgagattgtaccattgtactccagcctgggtgacagagcaagaccctgtcccaaaaaaaaaataayracaaaaaaaamcaaaacctcaataataaaaagacaacccaattttaaaatgggcaaggggtatacacagacatttctcctacgaagatacacaaatggtcacaaagcacggcatcattagtcatcagagaaattcaaatcaaaaccacagtgctaggctgggcacagtggctcacgcctgtaatctcaacactttgggaggccaaggcaggcagatcgcttgagtccaggagttcaagaccagcctgggcaacatggcaaaacaccatctccacaaaaaaatacaaaaattagccaggtatagtggtccacaggtacctgtgaggccaaggtgggaggatcatctgagatcgtgccactgttctccatcctggatgacagagtgagaccctgtctcaagaaaacaaataccacagtgccacttcacagtcactaggatggctataatcaaaaagacatattgcaactgttggagaagatgtggaaaattggagccttcatcacttctaatgggaatgtaaaatcatacaatcactttggaaaacaatctgacagttcctaaaatgtttaaacatagagttaacatatgaccagcaattccacttacacccaagagaaatgaaaacatatgttcatatcaaaacctaacatttactgaataaatgtttttagcagcatttataatagccaaaatgtggaaacaacccaaatgtccatcagtggttaagtggataaataaaatgtgatatgtccgtataatggaatattattcagccataagaaggaatgaagtactggtacatgctgtggcatggatgaaccttgaaactattgtgagagaagctagtcgcaaaggaccacacatcttatgataccattcatatgaaatgtcccaaataggcaaatgaataaagacagggagtggttgctagggtttcatgggttggtagattaggaagtgatgactaagggggccgggtatggtggctcacacctgtaatcctagcactttgggaggccaaggctggcagatcacctgaggtcagcctgggcaacctagcgagatctagtctctataagaaaaaataaaccgggggcagtggcttacgcttgtaattccagcactttgggaggccaaagtgggcggatcacgaggtcaggagtttgagaccagcctggccaacatggtgaaaccccatctctactaaaaatacaaaaaaaattagctgggcatggtggtgggcgcctgtaatcccagttactcaggagrctgaggcaggagaatcactggaacccggggggtggaggttgcagtgagctgagatcgtgccactgcactccagcctgggcaacagagcgagactccatttcaaaaagaaaaataaagaaaaataaagtgatgactaagggatgtagagtttctttttggagtgatgaaaatgtttttaagaataggttgtactgatggggatacaactaaaagccactgaattacatacataccttaggtgggtggattatatgctatgtgaattatgtcttgataaagctgttaaaaatttttaaaaaagcaaacagtcactatggaactctttcatgtttttagccaagtatcttcaagaccttctcatggagagtgtgaatttttcccccgccaatctctctagcactggttccaggtatctgaatgctttggttgacagtgcggtggcccttgaaacaaaggatacctcgctagctaggtaattcttatgacagttttaatttcygcaatcatatctgctataaggtcttaaagactttttgttctcagcataattctatatgaaaaattggcaataaatacaaagcactgaatttagttacttcatgtctttgccagtgagtataattaatttggataaatrtggtattggttaatttttagtgttttcttcttccaggattagatttatgaagggtggttctcatgtatatttggaaaggggttagtatcacattgttccctgtgtataataagaaagatagtaggctaaatgatttggttgagcataataaattttggttatgtctacctttttgttaagtaggtcaggaattttcattctttttaacaggcattttacttatataataacatgattcttccaacaacctttagaggaatcaggaggtgtgggttaaataatttatccgagctactaaatggcagagctgagattcaaaaccagtcttataaagttcatatgactaccacttttggccatatcttagctaggactactaatattttgttttwgtttttgtttttgagacagagtctcattctgtcacccaggctggagtgcagtggcgtgatctcggctccctacaacctccgcctcccggggtaaagcgattctcctacctcagcctcccaaatagctgggattacaggcgcctgccaccatgcctggctaattttttttgtatttttagtagagacagggtttcaccatgctggccaggctggtctcaaactcctgaccttgtgatctacccacctctgcctcccaaagtgctgggattacaggcgtgagccactgcgcccggtagaactacgaatattaatacaacttatcataatcagagaacaacacagcagaacagcttacctgtcaatttaaaggcaatttatgtataagctcaaagagtagtgttttaggtataagagcatccctactgtatggcagcagaaatctagacttgaattaaataagttcagcagataacaaataccagttgtatgttagttgtataagcactggggaagcagggatgaatcatataatttcttgccttttttttttacaaataatgtgtattttagaattttttaaactttttttttatacttacatactatcatacaacttaaagtcacattatgtttkgtgccttcttactatagctctgttataactggggaagcgagatgaatacgatagtaacttccttaaagaacagtctctgcttacagtcaaataagggagatagaaatgtgactataacatagtgtgacagctgtaacagtaaaagtatgtacaaggtatagctgggtagcacagagaaggaggtagttaatgccaggatgacagggacgctcatctgagttttgaaggaacaaatggaactttgccgaatgaagaagggcattccaggcaatgggaacagtgtgtaaaaaaaggcataaaggtatgaacagcatggttatataaaaatctacagggcaataaagtcatttttagcaatgaggagtaattataattattgcccattaagcccatgtatatgaccagattcttcttttagttttatccctgcagtgaatgatttgacctctgatctctttcgtaccaaatccaaaagtgaagaaatcaagattgaactggaaaaacttgaaaaaaatttaactgcaactttagtattagaaaaatgtctacaagagtaagtaattgagttcagagtggtgacaatttataaataagggagtaataggacattgtcaaatttagttttggcagtaggtgtgattttaaaaacattaggaaatgggatccataaaacatttttttaagttgaatgattagtggagctggagatggttggatatagacttttccagctttttttttttttgaaacggagtctcactctgtcacccaggctggagtacagtggcacgatctcagctcactgcaacctccacctcctgggttcaagcaattctcccgcctcagcctcccgagtagctgggattacaggcatgagccaccatgcccagctaattttgtatttttagtagagacggggtttctccatgttggtcaggctggtctcgaactcccgacctcaggtgatcckcccgcctcggcctcccaaagtgctgggattacaggcgtgagccactgcgcccggcctgactttttcagcttttacttcatacaattttacttcatacaatttcttaccttatttttttttctttttgagatggagtctcgctgagacacccaggctggagtgcaatggtgcagtcttggctcactgcaacctccacttcccgggttcaagcgagtttcctgcctcagcctccccagtagctgggactacaggtgtgcaccaccatgcccagctgatttttgtgttttcagtagagacagggtttcaccatattggccaggctggtctcgaactcctgacctcaagtggtccacctgccttggcttcccaaaatgctaggattacaggcatgagccaccgcacccagcctcctgccttttcttaaaaacaaataatatgggttttagaattttcaaaatgtatgtgatttttctyatacttaaagtcacattatgtttkgtkgtgcattcttgctatagctagggtatccctcttatgatactttaggcctttttctgttcctttttgccccagagattagggcctatagatcaggagtatgtgtatatatgcacaagtaatttgacggtatgtaaatttattcaacaaatgactacatatgtgcaaggcactgtcatgtcacgtttatttttatttatttatttacttattttatttatttattttgttgagacagagtttctctcttgtcacccaggctagagtgcaatggcgcgatctcagctcactgtaccctccgcttcccgggttcaagtgattctcctgcctcagcctttcaagtagctgggattacaggcacctgccaccacacccagctaatttctttgtatttttagcagagacggggtttcaccatgttggccaggctggtctcgaacttcatgtcacatytagtacagaggtatttaggacctcctatttcaaattggcttcagatatgttaaattattattattattattattttttaaacaaaattcacagtttatttaggttgaaataaactatacaaaattgactttctttgccaaaaataacagcaatattttccatattatttctagataagccacaaaacaaaatrtggaacacttcacaaatttacccatcttccttgagtagaggccactctaattttctctgtgtygttctaattttagtatatgagctgccaaagtgagcaccaatttttttttgaatggctgatttactttcttcaagaataatkggcttacattaattgtaaaattgttgtaaacctgggcagcatagtgagactgtctctacaaaaaaattatttattttattatttttttttatttgagatggagtcttactctgccacccacactggagtgcagtggtacaatctcagctcattgcaacctctgcctcccaggttcaagtgattctcctgcctcagcctcctgagtagccaggattatgggcgcatgccaccatgcctggctaatttttgtattttyagtaaagacagggtttcaccatgttggccaggctggtctcgaactcctgacctcaggtgatctgcccaccttggcctcccaaaatgctgggattataggtgtaagccactgtgcctggccatctacaaaagatttaaaaattagccaggcatagtggcatgtgtctgtagccctrgctatttgggaggctgaagtgggaggatcacttcagccaaggagcttgaggctgcagtgatcacaccactgcattcaagcctgggtgacagaccaagacctcatctcttaaaaaaaaaaaaaacccagagtgcaacatggaggggaagatgacctggttaccaactcttggccaagccagcattgaatccaaaagtagtagagtttctattgtacaatacttttactgagaagaagaagaagaaaatgtttttaattttgctttttaaagggatgtcaagaaagcagagttgcatctgtctacagaaagggccaaagttgataatcgtcgtcagaacatggactttctaaaagcaaagtcagaggaattcagatttggaatcaaggctgcagaggtttgtatgaaggaccgaatatagttagctctcttcggcctgattttttaccatcatcctcacagctaggcattattattccctttttacagatgagaggactatagagaagttggtatgttgcccaagattacatagctattacagtaagcagatctagatccaaactcaggcatycaggctctgaaactcaggccttacacactgcacccatcttgtcacaaatgcgtgagtgtggaaaggattcacatgtaacgtacaaatgcttagatacatgtacagtttttcatttatacttgtagctcctctttactgtgttatatgttaaaaatatttgatgggctgggcacggtggctcacgcctgtaatccagcactttgggaggccaaggtgggcggatcatgaggtcaggagatcgagaccatcctgactaacacagtgaaaccccgtctctactaaaaatataaaaaattagccgggcgtggtggtgggcgcctgtagtcccagctactcaggaggctgaggcaggagaatgacatgaacccgggaggcggagtttgcagagagccgagatcgcgccactgcactccagcctgggtgacagagcaagactcggtctcaaaaaaaaaagaagaaaaagaaaaatatttgatggtggtcacttttsaaataattttttaactgaactcctttttttggtaattgtaggagcaactttcagccagaggcatggatgcttctctgtctcatcagtccttagtagcactatcagaggtgagcttattttaacctaatttaactttctttaaaattttactccacagtctgctttttcatttgtttctttttattcggcttttattcactgtggacctgatttcttttcctttacctttgtactttatattcactggtatttatatcttttattccttgtttagctgtatatgccctcacatttgcatggtttcctttttattataagttagaaactccgctggagtcacttatgtattattgatgtatttattaaacaaatttattgaaggaccatgagctaatcatctaggtgctcccctttcttctctttcagtagacagtaaaatgcaggtctccaaactcctgtagttaccaaatgcaattctgggattttaggttatataaaggttttacctgttttggtgggaagagagaaatagagggttttgttttgttttattattcttaacgtttttcatactttgttcttggaatctaatgttgacaattcataaatatgtatttgggattctagttctccctttacatttttttccccttgtttttataaatagagatggggrtcttgctatgttgcccaagctggtctcaaactcctgggctcaagtgatcctcccaccttggcctcccaaagtgctggggttagaagtgtaagccaccacacccagcctcctttatgttttgattcctcttaatcacattcttttctattctaagacagcatacttcaatcctattgttaataaatgggagcaaaggccaggcatggtggctcacacctgtaatcccagtactttgggaggcagaggcaggaagattacttaagcccaagagtttgagaccagcctggccaaaatggcgaaacctcatctctactaaaaatacaaaaattagccaggcatggtggcacatgcctgtaatcccagctactcaggaggctgaggcaggagaaagaagaatcacttgaactcagggggcggaggttgcagtgggccgagatcgtgccactgcactccagcctgggtgacagagcaagactctatctcaaaaaaaaaaaaaaaaaaaattagccaggcatggtggtgcacgcctgtggtcccagctacctggaaggctgaagtgggaagattggttgagctgaggagtttgaggccaccgtaagccatgattgtaccactgcactccagcctgggcaacacagaragactccatctcaaaaaaaaattataataataataattaaataagactataactttcctattttaagcatctaacaggtgttgtttccatttggagtgagtttgtctatctttgaagctttttattcgataacgttatttaaaatatactaatgttaatgctttgttgtgttttatttcagaaatggacagtattagttgcattgtgaatgtttctattactctgtgactgtgttcttttacccccagaaactggcaagattaaagcaacagactatacctttgaagaaaaaattggagtcctatttagacttaatgccggtaataattttcgcgaattaaaaaacaattatttcctccaaccttccctgagggtactatatgaccatgaaaatagtgtgtttaggccaggcacggtggctcacgcctgtaatcccagcactttgggaggacaaggcaggctgatcacctgaggtcaggagttagagaccagcttggctaatatggtgaaaccccgtctctactaaaaatacaaaaattagctggacccagtggtgcgcaactgtagtcccagctactcaggaggccgaggctggagaatcacttgaacctgggaggcagagatttcagtgagctaagatcgtgccaccacactccagcctgctcaacagagcaagactccatctcaaaaaaaaaggctgggcatgatggcttatgcctgtaatcccagcactttgggaggccgagacgggcagatcacgaggtcaggagtttgagaccagcctgaccaacatggtgaaaccccgtctctactaaaaatacaaaaattagcagggcgtggtggtgggcgcttataatcccagctactcaggagacaggcaggagaatcgcttgaacccaggaggcagaggctgcagtgagctgagattgagccactgcactccagcctgggcaacagagtgagactctgtctcaaaaaaaaawaaaaaagaaagaaaataatgtgttggtttttaaaggtttaaagtcagtggtaaatttcagtgttatatgtacattgggtatccctctgggaggatttttgccttttgaaaaggattatggcattatttttctccttgggtctgaattgaggcaatataacctttccttgttttatttttttttaaagaatccgtctcttgctcaagtgaaaattgaagaagcaaagcgagaactagtaagtagttcctgtaattttttcagatttttttaaaaagaaaataaatgctaatatagctaaagtcttcttcatccttctttcctttctcctcagtggtaagctgcagtcctaaagttactgtgtatcattctcctgcatcttttaatacttttttggctgtgtacgtgtgtatatattttttccattaagaaacatatagtagctgggcacagtggctcacacctgtaatcccagcactttgggaggccaaggtgggtggcatctgaggtcaggagttcaagaccagcctggccaacatggggaaaccctgtctctattaaaaatacaaaaataagctgggcgtggtgatgcgtgcccgtaatcccagctacttgggaggctgaggcaggagaatcacttgaacctgggaggtggaggttgcagtgaactgagatcacgccactgcactccagcctgggggacagagcaagactccctctcaaaaaacaaaaaaacacatagtagtattttatgccttttaaaattttgtgtacatttccctagtggaaaaaggggaatatattgagagatatagaatattctaggcaaaaagaatttgcaaaggcatataagctgaaacatggaggacttactcaagctgtagcaagtgataaagtccggctgcttagaaacatgaaatgtaagataaagttggaaaaggtcaattggttcatgatgtagaaggccttaayatataaagagtgttgaacttagaggatgtagggaccacagaaagctgctgtgtgtttccttgttttttaagctcaagagaaatatgatcaaagctatgctttctttttttttttyttgagacagaatcttgctctgtcctccagactagagtgcagtggcgttatcttagctcactgcaacctcygcctcccaggttcaagcgattctcatgcctcagcctcctgagcagctgggattacaggtgtgtaccaccatgcctggctaatttttgcatttttatttatttatttatttatttatttatttatttatttatttatwattttgagatggagtcttgctctgttgcccaggctggattgcaatggcatgatctcagatcactgcaacctccacctccctggtgcaagtgattctcctgtctcagcctcctgagtagctggaactacaggcacctgccaccacgcctggctaatttttatatttttagtaggacggggttttgctatgttggccaggctggtcttgaactcttgacctcaggtgatccacccgcctcagcctcccaaagtgctggagttacaggcgtgagccaccgtgcgcggccaaatttttgtatttttttagtagagacggggtttcaccatgttggccaggctggtctccaactcctgacctcaagtaatccacctgctttggccttccaaagtgctggcattacaggcatgagccaccgtgcctggccaaagctatactttttgatcaggttagtgcttcagaagattattctgtagccactgttgagggtagattgggagaaagaaaattgcagaaaccaattagcttatttaggccagataagaagtaatgaggacagtggcaatgaaaatggaaaagaggccaggtgcagtggctcacacctgtaatcccagcactttgggaggccaagtgggtggatcaaaaggtcaagagttcaagactaacctggccaagatggtgaaaccccatctctactaaaaatacaaaaaaaattagccgggcatggtggtgggcgcctgtaatctcagctagtcgggagactgaggtagagaattgcttgaacccgggaagcagagattgcagagtgagccgagattgtcccactgtactccagcctgggcgacagagtgagactgcatctcaaaaaaaaaaaaaaaaacacagaaaagaggtgatgtgagtgacattgtggaagcacattgttttagtagcaaaggccagaaaaatttattcatatgtcgttacagatttctctctctctaaaggcttttttcccttcccttcacatatttcttagaatcacttaggagtctgagtgcttttgcaggggaagaggggagatgtaaaarcaagggaatatctaaaagcrtatttgatattcataatggtatttttaaaattttttgttctaatgtttccttttttgcttcccttattttaaataacattaaataaaagttagagcatctgttttatgtccttatctatggtatgtctttcttcctgtaggatagcattgaagctgaacttacaagaagagtagacatgatggaactgtgacaaaagccaaataaacatccttttccctaacaaagtaaattgaataggactttacagagttctttttcctcttggcatttcctaataacaaaactttctgtgttcttagattacagaatatcataattgatagaatatggtttcttactgtgtgttgcatttttgtgcccaaatacatagttttcatattaaaaagccttttctcttactttgtttctgtgtggttggtggttaagcatccttcagtagctctacaaggcaaacattacaacagttgtgcatgtattcattaggtcagctaaagtgaaaaggaaaggttccacagctccagtatgtttctcccactctcttctttctccaggggtttgctgtcattctttttgatcagctcactgcctgcctccaaatgttaatatatgcaggaatttagtttatgaaaaagatgaccttttaaatcagtagtagaaagatggataattcaacccttggtattaggtccatacttcacaccttatgtcaggataatccaaagaatcaaagatttaaatataaaaaatttgaaaataaaggtactagaagaaattgaagggaagttttaacgttttggcttctttttaagagacaggttctcgctatattgcccaggctggcctcaaaatcctggactcaagcaatcttcccacctcagcctgttgagtacctgacaccacaggtatgtgccactgcacccagcctaatgtttgatttttaaataattgtgagtcagaaatgtatgaccagaacccaggtgccataaataagtgcttaaaatatttaaatgttttgttttaagacagagtcttgctctgtctcccaggctggagtgcaatggcatgatcttggctcactgcagcctccatctcccaagtacaagcgattttcgtgccttggcctctcaagtagctgggactacaggcgtgcaccaccacaccagctaatttttgtatttttagtagagatggggttttaccatgttgaccaggctggtctcgaactcccgaccgtaagtgatctgctcgccttggccttccagagtgctgggattacaggtatgagccaccgcgcctggcctatttaaatattttgaaataataaaaatacctgcatggcaaaatctattgtaagtaaaatcaaaggacatgataaatgtagtacaggaggagatttttcactgtacctttttgtgccttttaaagttttgtaccatgcaattaaaaaacaatcagctttaaaaaaattatttcaatgtctttaaagcttttttcttttttcctttcccttgctgtcagccagaaaaagacatttgtattttcttttggaaactgtccatatccttttgccatttgtgtattagcttttggtctttttgttaacaatttatagaagcttcttatgtattagctaaattaatcttttgtgattggacttgcaaatatttttccaagtttgtcatttgacttaattgcagtgctcttcataaggcaatttgatagattgattgtggaaatgaccacaataattcttctcatctctatgcactcacccctttgtaacatgacgtggctctttctcccatcaaaggagaatctatactccacctgctgtatctggcttggccctatgacttgtttcggccaatgagacaacagcagatgtgacaaaagcaaaggaatataaactatgcattggggcttgctctctcttacttccttacttctctttggaattccaaaaccaccatttaaagaagcctggacaggcctgttggaggagaagaaactatatgaacagcctggcatggtggctcatgcctgtaatcccagccctttgggaggccaaggcgggcctattatttgaggtgaggggttcaagaccagcctgggcaacatggtgaaaccccgtctctactaaaattgcaaaaattagctgggcgtggtgatgcacacctgtagtccaagctacttgaaaggctgaggcaggagaatcacctgaactctggaggtggaggttgcagtgagctaagattgcaccacttgagcaatagagcaagactctgtctcaaaaaaaaagaaactacatgaagcagagacagtaattccaactgaaccttgcccccaacccttaagacaaaactggctgccaattgctagatatgtgaatgaggtcttaggccatctagttccaattgagccaccagcaaactgcagagatcaaccaagcaagcccaagccagaagctcaactgatttgaaacattaattatatttaaaaatttctatgccaggcatgatggcccacgcctgtaaccccagcactttgggaggccgaggcaggtggatcatgaggtcaggagttcgagactagcctggctaacagtgaaacccccatctctactaaaaatacaaaaaaaatagccaggcgtggtggcaggtgcctgtaatcccagctactcgggagcctgaggcaggagaatcgcttgaacctgggaggcggaggttgcagtgagccgagattgcaccattgcactgcagcccgggcaatagtgcgagactctgtctcaaaaataaataaataaataaataaataaataaataaataaataaataaattccttgtacggcaacacctgactaatgtatgatggagtaactgggagaaggtgtatgtatgctacaaagtgtcttctgctgtccttccactctccaagcctcatgaatctcccttgtaacccattctaactggaaacatgctaggaagagaaatctataaactgtagtttacccaagttgacacatcacaaagccatttcacacaggttcaaagagtctatcaaattctaagtaggataagtgtgcaaagaaaagagtacgaaacaaggctgggcgcggtggctcacgcctgtaatcccagcgctttggaaggctgaggtgggcagataacctgaggtcaggagttccagaccagcctggccaatatggtgaaacctgtctctactaaaaatacaataattaaggccaggcacagtggctcatgcccataatcctagcactttaggagactgaggagggtggatcacctgaggtcaggaattcgagaccagcctggccagcatggcaaaaccccgtctctactaaaaatacaaaaaaattagtcaggtatggtggcaagcgcctgcaatcccagctattcgggaggctgagggaggagaatcgcttgaacccccgggggcagaggttgcagtgagccgagatcaagtcacttcactgcagcctgggtgaaagagtgaaactccgcctcaaaaaataataataataataaaataagaattagccaggcatggtggttggtgcctataatcccagctactcgggaggctgaagcaggagaatcgcttgaacccgggagacagagattgcagtgagtcaacatcgtgccattgcactccagcctgggcaacagcaagaccctgtctcattaaaaaacaaaacaaaacaaaaaaccaggcactttgggaggctgaggtgggcagatcacaaggtcatgagtttgagaccatcctggccaacatgcgaaaccccgtctctactaaaaatacaaaaattagccaaacatggtaatgcatgcctgtaatcccagctactctggaggctgagcctggagaatcgcttgaacccgggaggcagaggttgcagtgagccaagatcctgccactgcactccggcctgggcaacagagcaagattctgtttcaaaaaaaaaaagaagaagaagaaaaaaagaattcaagtaaagtgacatcaaacaaacaaacagagacagtttattaagagcagatctaaattagctgggcatgccggtaccttcctatagtcctagctactcgattgcttgagcccagggggttgaggctgcagctccagcctgggcaacagaacaagaccttgtctctgaaacaaacaaaaagtccgggctcagtggatcactcctgtaatcccaacactttgggaggccaaggcgtgtggatcacctgaggtcaggagttcaagaccaatctggccgacatggtgataacctgtgtctactaaaaatagaaaaattagttggggattgtggcacgcacctgtagtcccagctacttgggatgctgaggcaagagaatcgcttgaacttgggaggacaaggttgcagtgagccgggattgtgccaccactgcactctagcctaggtgacagagtgagactgtctcaataaataaataaataaataaataatttaaaaaattaaaaaacacccagcagacctacattaatggaaattctaaaaaaaaaaaaaaattatcagaaggaaaatgattccagattgaaggcctggaacacaatggagaataaactgcaaagaatgtggcaaatatgtgtatgtgggtaaatataaaaaacattgaccaggctgggcccagtggctcacacctgtaatcccagcactttgggagaccaagactggtggatcacctgaggtcaggagtttgagaccagcctgaccaatatgatgaaaccccgtctctactaaaaatacaaaaattagctgggtgtggtggcatgcgtctgtaatcccagctactcaggaggctgagacaggagaatcgcttaaacccaggagatggaggttgcagtgagccgagattgcgccattgcgctccagccttagcaacaagagcgaaactctgtctcagaaaaaaccaaaatacaaaaaacaaacaaacaaaaaaacattgaccaagaaacggtaacaaaatgattaatgggggctgggtgcagtggctcacacctgtaatcccagcactttgggaggctgaggcaggaggatcgcttgagctcaggaatttgagaccagcctgaactacattaggaaaccctgcctctaccaaaataccaaaaattagctgtgtgtggcagctggtgcctttagtttcagcgacttgggaggctgaggtgggaggatcacttgagcccaggaggaggaggttgcagtgagccaagactgtgccattgtactccagcctgggtgatagagtgagaccctgactcaaaaaataataataatgacatggaaaataaacacaaaggagaggataaacaaaccaaaagttggttctttgaaaagactaggaaatttgccatgttatgtaaatttttaaataaatagagatagcattattcataatattttcttgcctccagaatctaaagtgaatctcctttgcttacttgttccaataacatttggagttataataataatgacatggaaaataaacacaaaggagaggataaacaaaccaaaagttggttctttgaaaagactaggaaatttgccatgttatgtaaatttttaaataaatagagattgcattattcataatattttcttgcctccagaatctaaagtgaatctcctttgcttacttgttccaataacatttggagttataaaaaaggtggtgggatagggagtgcagctcgtcaggaagccaggaaagctgggtccagagagcacagaggagtggagtagatcctggaggagacaggggcagctgctccaaggaccttctgtctctttgccttgatgtgccgggaggaatgtggggtgtggacaagcaaacatttaaggcagtccaaaattaaaatttttgctataattccatttctaggtctctaacctgcatatatcttggaaacatcaaatacacacacatttatggggagatggtggcgtgagagggaggagcctccatatttttgtctccacttctgatccctacactgcatgtctgactgtagagaaccaccacgttactcctaaatacttctccacttgtctcctaagaacagagacattctgagataaccactgtgaaatgatcaaaaacagggaatttaacattgatacaatattactaaatgttatcaatttgggggctgggcatggtggctcatgcctgtattcccagcactttaggaggccaaggagggtggatcacctgaggtcaggagttcgagaccagcctggccaacatggtgaaaccccgtctctactaaaaatacaaaaattagccgggcatggtggcaagcgcctgtagtcctagctactcagaaagctgaggcaggagaattgc

SEQ ID NO: 96755 - DNA, 73397 bp, Homo sapiens
agaggtagcatctgagctgtatactaattttatagtacaattaggtataattaggaactgagaagaactcttttaaggaaaaagcttgagcaaagaaataggggaagaatattacaaaacacttatgaaatggaaagttgtaccatttggttttagcatagcggttaaagagtagctagagaaaaaagaaagacttcaagatttaaggccatgagaagtcactgaaggtttttgagcatgggagcaattaattacatcaaggtactttctctgtgcctcagttttttcatttatatgagcattcttccttctacctttctcctggcccaccctataatctccatctgttgaaccctatccagacccagcgcaagttccagctcctccataaaaccaccactaatcaactccaaacatcatgtctttaaattcatacacatatttctgtcctcatcttacagtcaaactttcagtattatattgaaggtattcagtctttcctttttgaatagtctcttttcctggcttctgtgacaacatactctcttgctttttctccctcctcctctggctccaggtacacgatgaaattccaaggtttcctagggccatcctaggtcctcttttcccactcttctctcctaagctgattctatccattcctccagctttaaacaccataaacatactgatgacttcaaaagccatttatctaggatgacctcccatcccaagctctagcagcagctaactgcctacttgacatctcaaagtaaacatatttccagaaccaattcttgtttctccaaatcctgttctctaccagttttcaagtgacactaccaaccactcatttgtaaagctagaatcctgggaatcagatttactcctttccttttccttatccaccacattcatcttggcattcttcttctaaatatgttcccatctttttctcttttccaccaaaaacgttcttgcctccctaaaatccatttacctaagcacttaaagtgaccttttaatgctaatcagattttgactttttcctgctttgaatcctgcaaaagtttaccactgtatttaaattaaattcctagtcccctccaaggtcttacatggtccttatgttccttaaatctgtgatataaatcttaggtaaccagctgtagacaaagaactcttctgtttggcttgacattagagattgatgatgcttgactaggcagtagatgcccatcttcgtggtaatgacaaagaacagggttcccaatggatataagaaactgaaatcagagacttgataaatgataaattcaaggcaagcaaagtgacggcagtattgccaaatagtagatgattacaaaaggaaaaaaaacctaggacaaaagaagtcgaagatgcctgaaattatcagcagaaaatggcaggcatgacttttgataatgtaatgaactatttaataatgatatagcagttaaggcatttgttgccctacatgaccttctaaaacagcagaagcaatgatacaaactttagagttgacacttgataatgtagtgatacatatgatgatatatttaccaactagcttttcttcactaatctcaaagatcatgaaagtttaaactatgacattttagatagcgcttaagtaaccagagttccttatcaggacctggcaggtaaaagtgttaaatgcaatagaataattcttactgattaaaaaaaagtaaatgagttaaaaactcaaaatatctgccttgacttacccaaatggatcaccaaccacaaggaatgcaacatcactgatatcagcatcctttaaaatattatctgcttcttgttccacttcttctctatcagcaacaaccaattttcttccataaaactcttcctacagatataagtccaatatcaagataaagagacagcaggtgaccattctaacacacacacacacacacacacacacacacacacacacactctttgtttgggactggtgcatatgttggcaaccacccaaatgcagatcattcaatacaactcatcagtaagccagtactttatgtcatgttgcaattaaactctgtatttggggctgtcttaatatcccaaaggaggcggaactcttaacatctgaggctttttgcattttaaatttatttctaaatttggttctaaaggccaaatagaacactgtaggatgaatgcggaatatgtacacatgagccctacttcagaaacatgatgtaatacagaataaatatattaaacaataagtttaaacaaacatggtggtttagcttttattaaattttcaatggttaaacatatggcaactcagctagaaaaaaaaggcagcaccaatgagaaacaatagaaaattagctgtttacagaaccagtgaacattcctacataaatgcagaagatactaatttaaaactatattccttagtttctgctaaaaaggcagagttgcaggagcagtaactgaattctaaatatgtaggaagtttgcaaacaaactgctttgtgatttaattccctgcagctcaactctagagaacaaatccagtagagagtgagctagtaagctagtagtcatctgatagtggttacgggctattatgcaagatcatgaatccttttcttttttttcatctcgtcagccagtacagaatgaaggatcatgaatcttaaaactgatttcctgagaagtaataagtaattcaaatggagtaaaactggatgcatagataaataatacggtttcttacatactgagaactttgagtgagttattaaaatttataaggattgctgtagtgcaacggtatctggtactcaataatatctgtcaaacaaatgagtacatgaacaaattattaagcagggcaggatccagcattgaccattttgcttgaatcctaccttctctgtaggtgttctgtgaagttaaactttgtgtagctattatctatccttaagaatacagagacacagtacagtgtagaggtcaagagtggtagacctcggccgggcgcagtggctctcacctgtaatcacagcactttggaggccgaggcaggtggatcacctgaggtcaggagttcgagaccagcctggccaacatggtgaaatctcatcctactaaaaatacaaaaattagccgggcgcaatggcacacgcctgtaatcccagctactcagaaggctgtgacagaagaattgcttgaacccgagaggcagaggttgcagggggccgagatcgcaccactgcattccagcctaggcaacatagcaagactccgtctcaaaataaaaaaacataataaataataataataataaaaagagtggcagacttcaactcaggactgctttggttcatctcctggctctatcattcactatctgcatgaacttaggcaagtttgttaacttctctatccctgcaaaatgaacagtaattagaataataatcctaatctacatgtaaagcatttaaaacagtgcacagtaactgttctgtaactgttctataaatgtcagtacttattactgtgaagaaacagatattccagcaccttaacaaagtacacataatttactgtaggtaaggctgggtccagcttcaggtcttgactctgtaagtagtaactccagaagttttgtctttggaaaaaaatactttacaaaataacagcagccaaaattaacatttagctagcactgaaaatttacaaagcactttcatatacatcatctcaataaaacactacataaccctccaactggtaattgccacttgacaaatgaagaaactgaggttcagagaagtttggaaatgtgaacattgacaatttctatttctgaacagttttgtgccatataccatagttaagaacctatgctaagaattatgctgaacacctaaagtagatgttttttaccccatttaaaaaagacactaaagttaaaggacttgtccaaggtcacattaacatgtaacaaagataaaactataaccaaactttcctctatgccatcccctgatatctcattctatcaaactgctgttttgttatttgtctgtcttttcttgaaggtgttaagttccttttacttttccttaatcactgattagagacgcacatttccatcatttcgagcttagatattttggttctatcctaagagtgaaaaaatgagaaaaaaaaatgttttttaaatcaaagctggccttaggctgggtgtggttgcttgtgcctatacaatcccagcactttaggaggccgaggtgggcagatcactagagtccaggaacttgtgaccagcctgggcaatgtggcaaaaccctgtctctacaaaaaatacaaaaaattagctgggcatgatggcacccacctgtagtctcagctactcgagaggttgaggtgggaggatacttgagcccaggaggctgaggctgcagtgagccatgatcataccattgcaccccagcctgggcaacagagcaagacttattttctctctctctccacatatatgtatatatcaaagttggtctttacacacaacttttatttaaatgcatggccaattcaagtagcagttcttaattccttctataagattttaaagtaatctgaggcctaaaaattttaagtctattttttgtttggaagacatgacaataaatctgctccctcctcccataacatatgtattaatcctttgatttacattctacttagagtttgacaatgaacctgaagttgacccttcccccaaatttactgggcccttatgagggccaactataaatgtataatatactaacaaatactttggttacttagtgtatactcatgtaagtgtatactcatacatttttatatattaagtccaggctcactcaatatatacaagtgtatcagtataagccttattgggagatagtctatttaagataagatctctctggataggatacaaaaaggcaatcgccattccctatggacacacttcaaagggggaagctttcagcttggtttttgaatatatataaccaactcattaaggctgtgtcagctcctcattagcactcaactcagaaagggtttcttgactacctcatgaaataaggggttttgataactatcccccaggagtataaaatagctttcctatttactggagaaagccacaaaattagacttgtaaaataggacaaagcaccctttcattttccaagtcacttggttggtgtaaaatttccattcttctgctcctcagatcattaatgaacaagggatgcgtttcaaagggtttaaacaagcagacctgaaaattctgttcagcttagtgtatgaaaatcagatgttagatagctttcttcccaggaggctggggaacgctcagcacctaccaaggcttccttccctacagttaggactgaggtgtaggcttccagatacactcgactgcagcgtctaacaacttccaggcccttgactgtgatgtccttggcatctcccaggcccaacccgatgagataaagcatttcaaacttgaggagaagagagactgcaagacgaagtggacagaaaaaccgtcagtaacaccgaggacatctaaaatctagtgatgaacacgatgacaaccaaagtagcacaagagaagaggcaagtcacaaggaggggtttgggaaccttatgtcacgcttaagaactgggataagaggttttaaacaaccctaccagttttgcctcttgttacacaaacctaggagcagccaattacccgctgagagaatcgtaggtagttctctggcctttacaaattcttaactaccacctttccgcagaagcaactgcaaaagcgccggctccgtgcagagaaaaggcccacgccgccggcctcacctacggtgccgcaaaatgctggtgcctttactgcactttacgactagcgggagggggccgggctagcgggctactgggctgcggagaccagagcccrgctccactgaagaaacccgccggctgctggggcagggcggcgaaaggtcagtcggcsgagaggagtccgtggagccaccgtttcatagcctcagggaaaggatcgggcgtgctcacgagccctctaacccatggcttaaacacccgcttcctaagcctgggtaagtgcagtagctcttcgctcgagaggagccacgtggaagagagtcgggaggggccctgcgccctactcctcctctccagaaacaggragggctgggaaggattttcctgatttgtccccggatttggccgagtgcacagattttaattccagtcttctcatcctcctgtagttcaactaggtgtcttcctggtgaagcgtgagattggcaaacccagcagtgagtgtgcttctgatttcccaacaaggcaatgactccttgggtttgtccccaagaccttatgcctggagtgccccaaggatgtttcagtcaccctcagtgtcaggaatcccagaccttcctgtacctaaagaagtgacctttaatagtgctcagggatttcagacctctcaagtgtttctgccgggggaattcttataaagctgttggttacatgtaattagaaatagggaagatttgttttgactgaaaatgctcttcccaaggtgacctcatccaagttaaaaaagacagctgtcattgcttttcttagcaggcagtgttggttactcagaattttcctgttgcctccccgacaatgcccaactccgcttccttgaaccttggctttttttcattcccaggttccatccacctttttgcacttcctatctataaactcttcgtggctgtgttttatcccctctcattacgttgatctattcctcacaccacatacacaccccaaaaaactcaaaatggatcgtagatgtaaatggaaaacctaaacctataccagaagaaaacataggaggaaatattcgtgaccttatttaggcaaatatttcttaaaccaaaagcgtgatgaaaaaaattgataaattggacttcaacaaagtaaaaatttatgctcttcaaaagacttgaagccacatactgaaaatatttacaaagcatgtatctgatgaaggacttgtatggagaatatataaggagcactcagaaagcaataataaaacagttcgttgtttaaaaatgggcaaaagatttgaatagacaccaaagaagatacacaaatagcaaataattattttaaaagatcttaaacaaacaaaaaaagatcctaaacatcattagacattaggaaaataaacatttaaatcacaatgagctaccacaacccacctattagaatggcttaagtaaaacaaacaaaacctcacaaaaactggctgttcactcagaattcctagtatcgctaatattttgtagattcaaatttcagcctcctatccagacttcctccctcttggcttcatgttaacgttctgctggaaatcttcacctagataacccggaagcatattcaacacatccaaggttgaatccatcaccttccctttccattttgcttttctttccatattatctacttggatgggtcgggggtgggggtgggtgaggagagtattgtcatcaacagattaaccccagccagacacttgggagtcacccccacatcgtctgtcatgtctgcctgtatatctcaatagaaaccataccgtctatcaccatcttgattctcaggtcctcattttgtcactcttgtagctgataataatgtctccttcactcaagggggtcagagagttatagttaacaatctgaaaatattacaccccttctagatccttctgaggccaagagaaagtccaggtttgttaacataccccacaagatcattcgtggtgtggccactgcctacctttttagcatcatctctctccactccataccatgagctttctcgctttctctccagcaatactgaattgcttgtagttctctgcccacaacatgctgctttgttcctctacgctgctgcctcatcatagaatattgtctcccattctctcctgcctagatcactaatacccattctttaagaccaagttcaggaagccttcccagagaccctcacccccctaagctaatttaggtttctcctcttcattacagtattactctacatatacttactaaccaatttatgagattttatatttgttcatttgtatttcttctttaccaaactattgatttagttaattcagggactgcatcttatttgtatgctcatcttaggtttagcactatcccttgcacataataggtattaaataaatgtttgttgaataaatcattattatccactagtagctgagctacgtatttttccatctttattaatacagagggtggtatgttttaaaaaactaccaaaaaaatcattaatggaatatcaaatataaatatgcctgtctcatgccactttagaaggtcatttgtattgaaaggcttgcaacacacaaaacatatagttcatatgcatgctattgagtaggtaaacacattttccaatgtgttgatcatttatgttttttgttttcagatttaaaaaaataataatttcaggtagattcacagtgcaaggacactgccaaaaaggatgattaagtaatctgaagaaggtgtggtttatctcctttcaggaaatatatctatattgaaaataaagttattctgggtaatcaaggaagtgaaacattgcctgaaataacagtaataatttgtttttaagcttcaaaatgtagccagaggaacttagttttaccayggagaattcttaacaaacaaacctttcacctgccgttatttctcaataagagtgtaaattttttgtacttttctggaggtagacagataaagggattatggtaatcttttttgtttttcctcctcagctcaacaaacataagctgcaaaaatcttgcctattggattttgcagaattctgtgggatttggacatttttcccttgccatttaaaacaggtttcaaatgtgattacattttccccaacaatttattgtgaaaaatttcaaacatatagaaaagttgaaacagtgtcacagtcaacacccatatagccacctccaaggttctaaagttttaacattttgctgtttttgctttatcacttatttatccttttacccagatgtcaacccatcttatttgttgatgcatttccagggaagttgcagccatcaatacacatattacattttgcttgaaacataaactcctcacctaggtaatagattaacaaaacatacctaggcatatagctgattaaatgatatcattgcttcacctaatttaggctggattttgaaaattttgctgtaaaacgatttcaaattagtttttaacaaatattatagttttataatgataatgaaagcagttagaggacaaattcttttatgtcagcaaatttgtagtctcatgtctagcagaagagagagtgatggttaaagagaaaggtgattataggacaaaagaaaaaaagaaagatttttagccttttttggcttcaagaataacatggatagattagacctgaagagttttctactttgtattcttgctttcaggtcagatgatgccaagtcatccctgagggtgaacatttatgcttttatgaaggatctttaagatgtttttataacctttgccagtaactcatttttactggcaaattcttccttatatttgagacctacagtcagtagtcataaaatgtgagagagatgcagatagtcataagaaattaatactgatggcttttccatttcattgtcatagacacatcatatgctacttttattctgaagtaataacatagttgagtcactgcattaccttacggacaaattataattaccttacatttaagagaagtcatccttcaattgtcctgtttaagcagtttgtgtattgaaaagaagacatcagggtgactgactaaactccatctgaccttactgtgaatgaagaatattattttactatgaagctggccttttaacctacatgttcccagaaattgcctttgttagaggaaatcttggttaatatttgtagagctcagactcttaattgattgragtcattattttctaacaattcacaaataagtgataattaaagataacattgctttaggataaggacctgtatttactaaggttaaaagatttgaagttactttattgtacacttgtttacttagagaaaaagtcactttttataaacccagtgattttaagtactcatccatacattatatgttaatcatatgatgtaaaaatgcataaaaaacaaatctagagctattttctgtgtaaagtgtggaaatttttattgtcattcatcctagcttaatagattgaatcagtaacaatatggactgtcgtaaagaagtcacctagagccctgcgtttttgtgtaaaggagctcccagaatgttcccttaagtgcctgtgtgtatgtgcatgtatgtgtaaactttctgtttgtttctaacccattttcgtatatggcaggtccttcctccaaagtctattgctaaaaaggtagaatcagggatacataattcactctttttgcatttaaaaaaactacaggccaggcacggtggcttacgcctgtaatcccagcactttgggaggctgaggcgggtggatcacgaggtcaggagatccagaccatcctggctaacacggtgaaaccccgtctctactaaaaatacaaaaaaattagccgggcgtggtggcgggcacctgtagtcccagctacttgggaggctgaggcaggagaatggcctgaacctgggaggcggagcttgcagtgagccaagatcgtgccactgcactccagcctgggcaacaaagcgagactccgtctcaaataaaaaacaaaaacaaaaacaaaaacttacagtgtccctttaaggttttttagggaaacatagctaaactagccaagatttggtgggagaaggggagtggtttccctttcattcaaaagccaaaattcataaaagcgaactaccaggctgtatattagccacacacacatacccccactatctacaccactcccctagttctccagcctcacctcctcgtctccgtacccctggcccctacagatagctgtgtggctctggctccacttccttgaagtcattgttcagaattcacttcctcagtgagggctattttatgtaaactacaaccaacatttctaatcactttatccgcttatttgcccctgtagcattgctcactttgtaacacaactgtctagtttacttatttattatgatgttttttgtccacatcctattagagtataagcaccacaaaggcaggatttttttgtctgtgttatgctctaatgtgaaacaaacagctagaacagtgtttgatgctcagtaaatatatattgaatgaatgagtatacatctacacatggtaataagttataaataaatttctggaggagaagaactgaacagaggggattttttataatgattgagaactcacattttgatgtcattcagaccgtgtttagtctaggcctttcactcagtagtgtattccttgcattccctttttaaacctcagttacctattctataaaatagagataatagtaacatctttcatgggattattgtgaggataaatgaaaaaatacatataaagggtttagcatactttcagacaactagtaaagactcagaaaacattgacaaatattgatatagagtttgaaattaattttagaattatctacagtgtctgtcagattataatatgaaagtcaagtccacctagattggttcttattcttttccccattcacaaaagttatatgaatcatttacataattcagtaattatagaccaatccactaaatagtttactgattgacaaaagtcatcttaagcaagcattattattttaatattattctctgaggtattctttctgagagaagctcttcatttcaattattctgtcattgagttcaacactatagacttggttggcaccaaagaaatgttgtctggcaatttgttaaaacttaaagtagaacttaaaggaaatggagccaaatgtggtggtttacagctgtataatcctagcactttcagaggctgaggagggagaatcacttgagcccaggagtttgagaccagcctggccaacataccaagatttcgtctctactaaaaataaaaataaaaaagttagctgggcatggtggcatgcacctgtagtcccagctgctcaggaggctgaggcaggaggattgcttgagcccaggaatttgaggctgcaatgagctatgatcacatcaccgcactctaacctgggtgacagagtgaaaccctgtctcaaaaaaaaaagtgaatggactttgcttcttagtagtttagtaaacaaaatctgctagtgagcagagaaaatgttcatttgggaactgaattctttttttaaaaaagctttttagatgcccaacaacaataaaaagaatcattgtgttatgtgatacattcatataatacaatgctatacagcaatcaaaaagaatgaattactgctacatgaaacaacctggatgaatctcacagaaatgggatatagattacataaagcaaagtccaccaaattttaagtatacaatttttacgtatgtgtataaccatgtacccatcattctgataaagatgtggaacatttctggcatcccagagggttcccttttatcctctcccagtaaatgcccccccgcctccgccccacctctccaaggtaaccgaaccactatttgactgtaagttagttttggctattcttatacacggaatcatgtaaaatgtaccctttcgcgtctggcttccttggctctgctttactcatccatgttctgtgtagtagtagttcattctttgctgaatagaattctgttatatgaatgtactactattcatcttctttatttttgatggatgtttcagtttggggccaatatgaataaatctgctatgaacattgttgtatctgtcttttgttagacatttaagtattcatttctgttgggttatattacctaggaattggaattgctgggttataggatatatgttttcactttaacarattgtgctaaacagttttccaaagtgtttgtacaatttacattcccaccagcaatagatgcaagttacagttgctctgtatccttgtcaacacttggtattgtgataccttttaattttagtgggtgtgtagtgagatatcgttgtggttttaatttgcagctctgtggtggtgtcaattgcctcatatgtaatttttttcagttattttaaattttcagttatttaatttttcagttattttctttattcagtatgaataaaatcaatatcactttttgtattggacgaaagtgcttttaaagtcagtattaattaaaacctcttcaaagtcaatttatttatttttgaagacaaaaatatttctttctcccaccacagcaatatttaaatgtggaatctatacttgtagttgagtaaatccatttgtgaataagatacttcctttaaaggggccttaatagattcactaataaatatrtgtgaaatatgttttaatgtattgaaagcacttagtgcctgaaacatactaagtgctaaagttattttaaaataattaaaatatactttaaaaaaaawatatatatatatgttttgcctggagagaatacctgttgtcaggacacccacttctcattatgcctctgctgccaataactatgtgggtttggaccattttttgctatcartaacatgaatgcttttagttagatgatttctaagtcacattgtaggattcagtagcttcctttttggttagaatggaaaaaacactagaccggtaatcagtcaatgtaagttatttacacttgtggacctttgctttgtttcatgactcaaaacccaataagaagtatctttcccctcctcctccttttctacccttcctcctttaatagatttcgatataaaattgcaagcaatacagtaattccttaaacctggaaattagcataaccaatataaattttttttaaaaaacgttaagttactaaattttttatactaataaactgtagaccttgagttattcttcacataactgtacttcactgtaagtacagtgatgtttttcataactagaaactttttcaaccaaaattaaaccgatatctatatcaagttgcagaattttcacagatttaattttctcagagtgatttttgtttgcatttctaaatcctaggtagtcacagaatatgattcaccctaatcttatttccttacattttgctttatgttattagggtcttttgcttgttttgcagtaatattttctattgtatactttgagtagcattggttttttttcttcagcaatttttacaccttactatcagagctcattacattttctgataaaggcttattgagattcagactcaaactcatatagattctattttaatcttatctttgcttctggctattgcctctcttctggtgtttattaaataaaacctgatgaaatcctatcatatcaaaatattagtagtagtattagtggtatcaaaaatattgttttctccatgcataccaattgcagaagcagtgaatagcgtggttaaaagcctggactttaatgtcatgggctttagagtcagactacaggatttgaattttggcttctcttactagcaatgtgaccttaggaaagttcttgaacccttagttatattgcctgtaaaatacatataataaaggcacttataggatcatcatgatgattaaatgaagtaatactacacataaacagtgtctttgaacagtgtttttgcactttgtaagtgttcaataaatgttagcaatcattataaatattattacctttagggttttgtgaagattaaatgggataagtaaactgtatatctaaaggcctgcaatatagtgcacaattaacattagctagtattactaccaaaaatattctctagctakctggttttacagaatttctgtgtgttctaggtaaaattgcagtttaggaccatcatccatccctcctgacaccaaacaaaaagtgaatttgtaattagaatatttagtactaagaaaacatggacatccaggctaaagctcaaaccttttaaaaattataatgtagctgcaatgttatttgcacatgaaaggaaacagaaagtggtgttagtaattttaaagataaattttttcttgaataaggtgtgatgtttagttcctaataactttgtcctgtgaccgattaaacccatcagtaggttgaaggtgttcagggcatggtaatctgagactgaggccagtcattttcttagacagagaagctataagaaatcctatgtagaaattacttagtatcacactaattttgatatttgcatcacttagatgtcatttactttcctattatctgtgctcctgcctggcctccctgccatctcagtaatagagttccttgccttcttcctagtcatcaggacctgcatctctgccttgttatttcaagaggttgaacttgctactgatttcattcctctgagagacttaagttcttgccttggccccatctacccatgattgggttcccttttacaaagctaggctcccacaaaggaagacactcacctatctgaaattgccagggtcattgagcacttttgaacaggtgtaggcacaacttcaagaggtaccgttcacatagatgacatacagctgcccagctgtatgtggtggctcagtggccagttgcctatttctcgaactatggttgatcacctgctgtgttcctgcttggtggtcttcattagacagctcaggctgagattcttgcccatgtttgtggtcttcagtttttttaattatgtgatctcacctgcttttatcttgcttctggttaatttatctcaaatttcatggccatccattgctcagtgtgttgcctctacctggaatacttccctactttatctcataggaattatccttaaaattctagttcagaaacctctcatctatagtgttttcccacctcacataactgcaaatttttttcttattttgattttctttaatagtctattgctattatatgtttttcttaagactatggattttaagggcaaggccaatgttttatctttatattctctgtaactcctgtatggtgttctgctcataatagatgttaaatgaatattcgtagtatgtcttgatgaaagtgctacttaacaaaagcaggcaagtcaaggtatgctaatgaactgagaaaggagaggctagaaacaaggaaaatgacatgataaactattgcagtgatctgtacatgaggtgatagtaagtcttgcgtatactcagtgtcaaaagaagttgagatgtgttaattatataaatcagtggggatgaccatgaacataattaaatgggggaggggaggaaagggattgattaaagccagaggatgatgcaaactggatcctacttcttacttttagaagtttatatcaagtgtcaagaaaataaaagtaagttcaaatttaaattaacagtattctacattcagtgtaataatgtttaaaactatgtagaaatggatccttaaaaacctctcatttagtctttctagagctgtcataatatttgatgactatwaatgtaaattccatttaatggtgaaatttcaacaaaactggaatgagctatgggatttttcttttgcaaccagatagacaaataaataggcaaagagagttgagattattactcacttttgaaaatcatttgaaatacttttgcactcccttcccaaaaagccttttgagagctagagttatttatttttggagcatcacattttgacagatttttgcacattcttcagtggtcatcacatgaagagatttagcttaattccttgcacaactaacttgaagtcgtatgatacctagttgaccttaattgtgtcttgttcagtccaacaaatgcttactatgtctcatgcataargctatgtgctctttattctcagggataaaaagaagcataaatcactatttgtaccatctagggattatattcaaatgaagaacacagcacacctgtgccctatagggatatcacaatatgtacagtgatacatgctataatagaagtgcaagcagtaaggcagaaaaggaggaaaaagattaattaaactggatactgttctaatagcttgatctgaccttattgtttataatatctaggtaacacatggaagctatttctggattcttgatggtttagatgacttatcacaagataaccaaagtttgtttatgtcatggtttagaaagactaaatcggtgtaatgttgtccaggaagcccagacatgttgccgataggacagcattgcagcattgcagttgaccttcatccttacaaacacgctaactggatttttcttaggatacccacaataccagttgcttagcaatggactaacactagctatgtttatctgtttctggtatacaaaagtctggctgccattttatccacttctattagggtctaggaagaggtgagtaatatgtatttcttatttattttttttttttgagatggagtttagctctttcgcccaggctggagtgcagtgaagcaatctcagctactcrggttcaagcaattctcctgcctcagcctcctgagtagctgggattacaggtgcacaccaccatgcctggctaatttttttgtatttttagtagagacggagtttcaccatgctggccaggctggtcttgaactcctgaccttgtgatctgcttgcctctgcttcccaaagtgctaggattacaggtatgagccaccgcaccgggccagtaatgtgtatttctaattaggacatcccttctttcagatgccagtttgcaggttacttgatgaacataaaatcataacaggtaagtgggtctaattacctagatgcttggaagatgcagaaaatatctttcttctacatagtgtcctagttaatggaattcttttgagccctgtaagtgcccttgctgaactctgttttctggactaaccttttcacattcgttctttccgttaaaaataccatttaagctacagtctagttgctgtttctgagggcctggaagaattcagcctcatcccattaagtgtaggtgtgtttgaccagctctctgtcctcttaggcccatccctttattacagtctgtactttaagttttaatgtttataattaggatctcgtttattcttttctggtactcctgaataaccacagttttactaacaataacgtaaaaatatttcagccactacatgagccccattcaaaaaatttgtttcaagttagtttgttggctggaactacagtggcactaatataacacttgctccaagatctatgatctaatgctttaatcacacaggatgcatctagttactcaaatcagagattctagaatcaccctgagtgttctcaggtaattgctctgtcttgtcaattttgtctcttgcttatctcttgaatcattccagtattctccatgcccactgctcaagctttaattctggcctgtgtcctttttcacctacactatagagtagcctgctaactagtctccctatctcaagtattgccctagaccatctttacactgcaattgtgttttctctaaaaagatttatcatataatcttaaactttttaatccttttatgatatcttatataaaagttcaaattccttagaataatatacagacccttactatttagattttgcctatctttccagtcctttctccattctcctattgtataccttttactcctgccatgctgaactcacttccagaagtagggtttttcttgccatcaccattttgcacatgctgtttcactctctagagaactcccatgaccatcttccaggtagatttctatttattttcaagagtcatcttagacattccttgctccaggaaatctttcttatgctcccagacataatgtgatgtcttttttgtttccattcctatgtctaataacacatgctgtcttagagtaattaattatttgtggattcaccaatggactttgtacttctgagagatagagacaatgtctcttcctttttgtgactgtcacagtactagaacatagtgataatatttcttttgaatgaagtagagtaggcacttgacattctggatttaatttcctagcttgcaagcaaccttgaagattcatcacttgtactaatttgtattataatttgcagaggcataactttgacgcaagtgccctatggggttggtatgtaggaatgagtcactaaccttgtgagaattctagccagctacttgatgctgccctttcagagtggctttgcttttttcattatggaaattgtcaaggttcttttattagttttcatactgctataaaaacatacctgagactggctaatttattaagaacagaggtttaattggctcatggttctgcaggctgtacaggcttttgcttctggggaggcctcaggaaacttaaaatcatggtggaaggcaaaaaggaagcaggcatggccttcaggtggccagaacaggtgaggggagtggggaggtgccacacacttttaaacaaccagatcttgtgagaactctattatgcaacagcactaggggaatggtgctaaaccattagaaaccaccccccatgattcagtcacctcccaccagaccccacctccaataatggggatcacaacgcaacatgagatttcagtaggggcacagagccaagtcgtatcattctaccctggctcttcccaaaactcatgtccttctcacatttcaaaacaatctggcttcccaatagtcccccaaagtcttaactcattccagcattaactgaaaagtccaagttcaaagtctcatccaagacaaagcaagtcccttccacctatgagcctgtaagatcaaaaacaacttagttacttccaagatacaatgggggtacaattctctcattccaaaacagagaaattgaccaaaatgaggggctacaggccccatgcaagtccaaaacccttcagggcagtcattaaatcttaaagctccaaaatagcatttgattccatgtctcaaatccaggccacactgatgcaaggaatgggctcccaagggattgggcagctgtgcccctgtggccctgcaggttacagccctcacagctgctttcacaggctggtgttgagtgcctgaggcttttgcaggcacccagtgcaagctgtcagtggatctaccatcctggggtctggaggaccctcttctcacagctccactaggcagtgccccagtggcaactctgtttgggggctccaaccccacatatccactctgcagtacactagtaaaggttctccatagggctgtgcccctacagccgacttctacctggactttcggatgtttacgtacatcctctgaaatctaggtggaggctcctaagcctcaactcttgccctctgcacacctgttggcttaacaccatgtggaagccgccaaggcttgtggcttgtactctctggatcagtggccttagacatatctggggcccttttagccacagctggaactgaagccactgagacagagggtgccatgtcctgaggctgcacagatcagtgggtccctaggcctggcccacgaaaccatttttccctcctaggcctccaggcctgtgatggaagaggctgctgagaaggtctctgaaatggcttggaggcattttccccattgtcttggttattaacattcagcttaccttatgcaaatttctgcagctggcttgaattcctccccagaaaatgaatttttttttctaccacatggccaggctgcaaattttctgaacttttatgctctgcttcccttttaaatataagttccagtttcaggtcatttctttgtttatgcaaatgagcataagcttttagaagaagccaggccacaccttgaatgctttgctgcttaggaatttcttccacaagatacycaaatcatctctctcaagttcaaagttccacagatccctagagcaggggcacaataccaccagtctctttgctaaagcatatcaagagtgacctttactccagtcctcaataagttcctcatctctgtctgagactacctcagcctggacttcactgtccatatcactataagcatcttggtcagaaccattcaacaagtctctaggaagttccaaactttccctcatcttcctatcttcttctgagccctccaaactgttccagcctctgcctgttacacagcttcaaagttacttccacattttcagctatctttatagcagtgccccactcctggtactaattctctgtattagcccattctcacattgctatgaagacataccagaacctgcataatttattaagagaagagttttaatcagctcacagttctgcagactgtacaggcttctgcttctggggaggcctcaggaagcacacagtcatggcataaggcaaaggggaagccgtcacattcttcacatggccagagcaggagagagggggtagaagggggatgtgctatacacttttaaaaaacaccagatcttgtgagaactctatcacaagacagcactagaggaatggtgctaaagcattagaaaccacccccatgatccaattatctcctaccaggccccacctccaatactggggatcacaattcaacatgagatttgggtagggacagagagccaaaccatatcagttgtattgtaaaattttagttacaggatgaatttattccattttcatggactttttatgaaacttttcgtaacctgcatattcatttcaatagttaaaaggaaacacagcatggaactctttcttactctttggtttatttatgcatgatattcctctgtagagaatgtatataaattgttacttggtttgtatcattttcaaagattagcaggctcaatagtatttccgttgtcagtgaatttcatcttccagttttaatttaagtgttctctttctaacacccttcccaccattgttttgttttattttcactcagaatacagtattcctcatcttgccaaacacagwtccctctaccccttttctgaatttcttctcccactttcacagagacctgttatcctcttccataatttcagctactccttccccactgacttttacccttcagcatattagaatactcccatcttaaaaataatcaaaacaactgccctctaatcattgcccatttctaactatttctcaatacttttccttttcatcacaagtgttttgaagaaatgttcagagatcatctcaaattcttcatcatctctgctgttttcttaattcattttatctgacttctacccctactacagtgaaactgtttttgccatgaactctaatgatctacatattattaaaatagtgacagtctgctactggatctctgcatgttttgattctgctgaccaatccttccatggtttgtctgacaccattttctcttgaatttctttctatctgttctaagttagtctactcctcaactactggtattctcagcattccattctagatcttattcttccctcactctacaaaatttctacttggtgatcttatttactcccatggctccaaaatcacttctaaaattattacttttttctttgtctctctttctctccctctttctttctctccttccttccttcctccctccctccctttcttccttccgttctctttctttctttccctccctccctccctctctctctctctctttctccttccttctttcattcctttccctccctcccttcctccctccctcccttcctcccttcttccctccctcccttccttccttccttcctttttttctgagacagagtctcactttgttacctgggccagaatgcagtagtatgatcagctcactgcagcctcaaactcatgagccaaagtgattctcctgcctccccagtagctgggactgcaggttcatgccaccatactaggctaccttttatttttttggcagagatgggttctcactatgttacccaggctggtctcaaactcctggcctcaagtgatttccctgcctcagtctctcaatatgctgggattacaggcgtgagccacgtaatgcccagctaaagttatgagtttcatatgtttttttacttgggatttctttcctgagctgccatcccatatattcaactgcattttccacagcacctcaatactgtgtgtgcaaaactcaactcccctttccccactgtatatgcttttctttctgatttcccttttcctcttcctattgtaattccaagaccttatttctttcctccagaattgcttcatcacttcctaagactgattccggtctcatctgacatttaatcttcatcttcatcactgctcccaaaatgatttctttttctgaaacacatctttattttattcctctgcttgaaacatttcagtgcttcccattacattcaagataaaatgtatttaagtatatgtacacagtgtatttaagtcaatttatgatctggccccagtgtttctgtgaaaccacaacttttgcctctcctgtgtgctagtcaactttatatcaggtctcagggaacactctactgtctaccttccatgctacccactttcccccctctgaccttttcctcctgtgcagttctcattcttgaagcctgatgtcactacttccaagcctctgcttttcttccccatccactcatctgacattgctattcatcctatttcgtatttcttttatagcactgactaattcaactataatggtttctctgagtgtttcctaaactataagctttctgacagcaggaattatgtgctttatctttgtatcctgacaagtagaatgtaactgtggaacatatttaataaaagtttgttcgatgaataatgtctgtatttaatttacttcaaaaataatcaatagtacctgcaattacagtggtttctttttcattgtataatgcaaaataggttcacccttttaaaatggccccaactcctatatgaacttagagatatgagaaagtacctcagggtaaatgtaactacaagtgataataatatgataaagcctttgcaatacaattctgacctgaattacccagaggtaagctaaacttcacaggtgaagggcatagttctccacaagactgccctcatttcagacaccagccacaagcttgggggcttccagggctactctcacttctgatcagctgtttacaaatacatgaggatagctacaaacccttcagtttcaatcattaacaagaattattagacttacagaatacaggaaagcactataattatgataaaacttttattatatcaaaaagagtacatatcagaaccagccaaaagaagaaacacttatgaggtctgggatggcccaaatatgagggttccatgtcctctctccatggagttaaaattcatcatcttctggtagattgttgtgtgacaattgctaaccaggggagcttacctgaaccttggtgtttggagtttttattggggttttattatgtaagtatgattgactgactcataaccatgcagtggaactcaacctccatacttcttccctccctgcaggtcaggctggtatcacatggctgaaagtaccaaccttctaattacatggttgccctttctggaatgtccagcccccatcttgagtcatcacattaggttaaactatcattagcccaccataaataatgaagacactctgatcatggagaaatttcaagaacttacagtctctctcctggggaccagggacaaaggccagctacatgcttttttttgttttgttttgtttttttgagatggartctagctctgccacccaggctagagtgaagtggcacaatctctgctcactgcaacctctgccttctgggttgaagcgattctcctgcctcagcctcctgaggagctgggattacaggaatatgcctgtatttttgtacttttagtagagacggagtttcaccatgttggccaggcttgtctcaaactcttgacctcaagtgatccgcccacctcagcctcccaaagtgctgggattacagtaccttctttacaataacagccttgatcacctaaaataaaaaacatatctgaccatcaaaactaaaattgcaaaacctaaattatattggtagtccagaattcttgttcatttatctgttttaatcatatgatcattaagaaaagtccaaagaatttggaattcatgtacagattagaagtctgaatggcactataaaattgagttgacagcattaatttccatttggaaaagtctgctagaggttattcatacaggaagaatttatcagaatttgcaactatctctaaagtagattacacatattttatttggtgaatgtttcagaaattgtgttagtgtggacagttaagaaaataaaactgaatgatccttataaagctgatggtctgtgaaattctgcctacatcaaacagattcaatagagtaatctttatccattaagtgttatttcctattatttgatattactgatttaataaatttaaaatctattatttataatagacaagtatgtctaggtttcatttacaattaaactaattaaatcttgattaaagtttctgcttgcattataggtatcctaagtagcccagttaaactcattgtaccaatagtgacactttcttattaagaaagcccgagtgtaaagtataattcctgggaaggaattgaaaagtctctctaagacattaacctccaaaactttgaaaaattatgtaaggtaagaaaagagggtggacaaacacagtgatttaagtaatgtgagtaaaaatcacttgtgattggagggtcactgtttctagcaggatggcaaaataccctgtataattctgctactgaaaatggccacagatgctggaagaaatatgtaactgagctgagaagaaatttaagaaattcacaggtcaaaagcaaaatgaatacagaaacccagagagataaggtaggactcaagctgccttttccagggatttgtgcaaaatcctctttctttaccctgagctcaatttgcacattgagggaggtgacaaagtctaaagcctaccgaagaatctaatgatacctctgttgtaaagagatctgtacccaaatggctttaccagcacgtttggggtgaactagaaataaacctgtctcacaaaaggggacaacaagaaacactgacagaaacaactttctctaggccatgggacagcaaactataacccctgggccagatctgcctactgcctgtttttgtacaacccatgagctaagaatggtatatatatctggagtgcagtggcgcgatctccactcactgcaagctccgcctcccgggttcacgccattcttctgcctcagcctccccagtagctggtacgacaggcgcctgccaccacgcccggctaagttttttgtatttttattagagacggtttcaccgtgttagccaggatggtcttgatctcctgacctcgtgatctgcccgcctcggcctcccaaagtgctgggattacaggcgttagccaccaagsgcggccttttatattttttaatgatttaaaaaaataaaaacgacagtacttagtgatgtaaaaattgttatgaaattcaaatatcagtgtccataaatggagttttgttagaacacagtcatgctcattcagttatgtgttgtctgtggctgctttcacaccatagcaactgagctgagtagttgtacagagaccataatgcttgcaaagcctaaaatatttgctatctggccttttacagaaaaagttcaccaaactctggtttaggatttataatggttagaaatagtttgagttttcttcagatttagttcgactctctaacccatgtgataattctacataatcctttgtttaagtaatagattcaaaataaacaatagcacagttattgtaaaggcaaagaaatagaaattaaattactttaattctgctattctttgtgaccactttgaatctttgtgtttaaaactttaaaacaatgaaatagtgyaaactttaaggtataatacatgtttgatctaaaatttattcacaaaatatcttactgaatttttattttagtagaaatacattcttattcattaactattacttttttaagctaaagaacaaatttaaaaacaatttattacagagggcaaaaagcactaaccctaaaagaaaaaaattgataaatagggcttcattaaaattaaaagatgcttaccaaaatatattgcaagaaaaaagtcaagccagagattgagataaaatattcaaaatatgtgtatctgacaaaggacttacatccaaataaataaattcgactgcttaaaaatacgacaacccggtttttaaaatgacttgaatgacacttcaccagagaagatatattcatgtatgtaatcacaggaagaaggtgtgcagcatcattagttattagaaaaatgcaaattaatataacaaggctaaaattaattctcatacataactggcatagtgtaaaatggtgaaaggactttggaaacctgtttagcagttaattgtcgtatactctgtggcctaactcatttgactcctagtatttattcagagaagtgaatacatgtgctcacaaaaagacttgcacaagagcgtttgtagcrgttttattcgtaatagcctcaaactgaaagcaatggaaataccaatcagaaggagaatggattaaaaatatatgtgcgatacaatcatgtgacagaatactataagcgatttaaaaatgatcaactgatacaatctgaaagatgactgaatatcagaaagattatattgatcaaaagaagccagatgcaagggaataaatactgtttgatcctgtttatgtgaaattttataatgtgaaaggcaaaactaacctatgctgatggagtaagtggttgcctacaggggtgaggcttgattggaaaggtgctctagggaaatttccaggatgatacccccctttttttttcccaagacagggtctcactctgtcacccaggctggagtgtagtggtacaatcctggctcactacagcctcgacccaggttcaagcaatcctctcatctcagcctcctgggtacctgggactacaggtacaagccaccacacctggctaatctttttatgaaaatttttttgtagagatgagatctcactatattgcccaggctggtcacaaactcctgggctcaagtsatcctcctgcctcagcctgccaaagtgttgggattacaggctggccactgtgccaagccccagagtgataatcttgattggttattggttatatgtgtgtatccacttgtcaaaacctatccagttttgcacttaagattgcatttctgcagccacaaaaaagaatgaaattatgtcctttgcagcaatgtagagctggatgccataatcctaagtaaactaactcagaaacagaaaaacaaatactgcatgttcttacttataagtgggagctaaacaatggatacacatggacataaagatggaagtaatagacactggggactccaaaagggggaggttggagggggacaagtgttgaaaaattacctatcgggtacagtgttcaccatttgagtaatgggcatgttagaagcccaatcttcactagtatgcaatataccatgtaacaaacaagcacatgtaccccctgaatctaaaataaaataataaaataaatctgtgcatttcactgtgtaaatttattaagcaaaataaaacaaaaacttggtattcacataacttacaatcaaaatattcctaggactaatctagagcaaagatcttgcttagcactttagttaactagtacctctggataccattatacatattgcattattttttaaaatggcatgttatgtgatagggtaaaaaataatttccaaatggaaagctgcttgtctaaaaataaaatcaataaatcatgttctcttcaatttaccttcatcataaattaaatgcctataactgagtaataaaaataaaggatacaggagatcagcatcaaactgtcaagtcaaaattaggatcatgagaggagcgtactatcaattagatgttttatgttcattatctcagttaaccataataataactctggtaaataggtttaagctcccttttactgttgagtctattgaggtttagaaaggttaagcagcttgatcacagacacaaagctagtaagtgtctgacactcagtttttgaacctagttcaaccgatttcaaaatttaagctctgtccagagtaccccatatttcagagatcagtgagaaggggatagaaaagcagtttaggatttacaggctgaaatacagtagggtctgaaggatagatcattccagtaaggcctaagggcctggactacttgactgccccttcagatatctcttccactgccagacccaggcctccaagtaatctctgcacctcatcattttcctttgggtgccctgaaattcaaaagctggcccatatatcagtagttcagctacacttgtaccgatgtgatccatcagtactgaaaatagagatgagccaaggggaatagtgaaggtaaatcagtgcaatacattcctcaatagcggaggaatatactgtgtttctatattatgataaagagtagtggaagagaaaagcagaaaaacaaaggacaaatgggaaggtagacttaaagacagttgaaagtatactgaaacaggtgtatttttctatgaagtctagctttttaaagaaaaccatgttctaatgaaaagcagtggaaagaattatgatattaaatagttgctgactctgagaccaaatattggtatttgtgcagatcttgaaagaagtaaagtgtggcttattgttattttaggtaaagtattaagaattaaataaatgttttgaatgtttagactaatgtggaatatatgaaatgcgcaccagcacactttgaggaaatgcttagttctcagagtgaagcctgccccagttaaagcattctgaatttattcctaacttgtctgccactcgccttagacatgcttttggagactcaaatgttaccatctagtagatgagaggtttggactatatatgttctaataataataaccactatattttattgattatcttccatatactaggaaccacactagatgttttaagttttcacaattggggtgtgtgtgtgtgtgtgtgtgtgtgtgtgtgtgtgtgtgtgtgatattgcctatcttattaatgaggaaactaaaattcagagtgttaattctgggatttgaccctgactctatctggttccaaagcttttaaccactgtgttattttgcctatctatgggtccttcaactttaatatgctaagtttctatttccttgaatcagatcaataaatagattaaagttagatgtaaatccttgaaagtcagaggacttgattattgtcttacttttatctttatcttcaatgccaactacattttaggcctggctgcattcaagtgaaaggaaccaaacagattaatcataatctttgtaaggaggattgtattttatcattgcattttggttgccaccactcatgcggtcctctttccaccatgtttagcatggtattttgcatgtaatgtacactcagcaatttttgactgattacaaatagaaaaaggctcagaaatgatcagttctttttggtagaaattagactcagtgctttcatccaaacacaacagctgtttaatgtggaggactgataacaatagctgtaagtctgaggttaagagtgacctttcatagccaggagaggctcagaaaggtcactcttaacaaaagaaatattttgtaaattttaatttatagagccgatggactttctcatgaatgctagaagaagcctctcagataatagttttggccttagggaggcccaaataatttgtgtatatatttttagttaagaagaaacatacataagattattcttactgaatagatattaagattatgtgtcaaaaaactttctaccaattgtgaaagttaagtattttagatggcatttttattccaagtaatagttcttcttgactgcattagagacaaatgaatatttaccttgataaacaaccaatttaagttctatttaatcatgatgaaataatcctatgcacccatttgtcctaagtgtactctatatgaagtgtgtttgtttttaatcagccagactttaagtatgaccacttaacaaaactgggtatgtcacagatagttgcaatctttcctgataccagaaaagaatatagatgacagctaactttttaaagtaatattatttgataatgaatatatttccatgtctttatacaaaaaaattaaaaaaaatttctagggattctctaatatatcttaaagtattactaataatgtctaatttgtcatctgtgacatgaaactaatttccataatgcttggcatctgaacagccgtgactgcacctgttgctgggttatcccctcagggagtggttttagccctgggggaagacccaaataatttggtggtagaaggaagggaaaatggtttttagaacatttcaattattgtttctacaaatgtattgcaataatgtccttactccctcaactccctttcatttatcagctcattgctatcctgcttccttctctaaactatactgaagcagatcatgctaggtcacaattaactaagtgtcaaattccacgaagaratttaggctcttaacttatgtgacctcttaatagggcttgacacggttgatcatcttgatgatctctgccttttggcttctctgatccctttcttcaagttctctgcccctctgactactacttgtcagtacagacagtccctgacttacaacagttcagcttatgatttttaactttatgatggtgagtgatacatgtttagaaaaggtgtgctttgagtatcccttcttttcactttcagtacagtattcagtaaattacatgagctattcaacacataaaataaactttgtgttagatgattttgctcaactgacagctcatttaagtgttctgagcacatttaaggtagggtaggctaagctatgatgttcagtaggttaggtgtattaaatacattttcaactcaagacaatttcaatttatgatgggtttattgggacagaatcccatcataaattgaggagcatctgtatttctatacctttgttttcctgttaattgttagatttgttctttactcctgtgaaagttagtcttatgtgtcaacttgtctaggctgtagtatttggttatttaatcaaacactaatctagatgctgctgtgaaaagtattttgtagataaggttaacgtctacaatcagttgactttaaaagagataatgcagtaggttgtatgcactcagttggaagggtttaagagcaaaaactgagaattcctagggaagaagaaattttgtctcaaaactgcagcattaactcctgcttgagtttctgggtttccagcctgctgatcagcccaccttaaaaatttcagacttcttgccctacaggtttcaaactstcagcccctacagccacacaagccaattcctttaaataaatctctttaaaaaaatacacactctcatatacgtatacatgtacagatacagatcagatacaattatgccctagtatttatgagggattggttttatgtcctccctacgataccaaaagccaaggaagctcaagtccctgatataaatggcatagtatttgcatataacctatgcacatcctcctgtataaatcatctctagattacttataataaccaagacaatgtaaatactatgtaaatataccatattatttaggcaataatgacaagagaaaaaaagcttgtacatgttcactacagatacaatatttcaaatattttcaatccatagttttttgaatcagcagatgtggaacccaccaatacggaggaccaactacatttgttctgttctcctggagaactctgattacaaatccttttatcattttattcatcatgcactgtctatataattcttccgtttcacttcttcaactatgttcatagtatatcttttacctcagaatatttacctcagtcttttttttttttttttttttttttttgagacggagcctcactctttcgcccaggctggagtgcggtggtgcgatcttggctcactgcaagctctgcctcccgggttcacgccattctcctgcctcagcctcccgagtagctgggactacaggtgcccaacaccacacccgtctaattttttgtatttttagtagagatggggtttcaccgtgttagccaggatggtctcgatttcctgacctcgtgatccgcccgcctcagcctcccaaagtgctgggattacaggtatgagccaccacgcccggccagtcttttatctgaactcctaatcaacattttcaactactatgcatccctatattgatgtcccaatcccatcttaaattcagcatgtccaaatgaaatggttttttaaatccccacctcaactcccttctctccctatttccagtctcaattaatggcaactctacacctaattatcctgtgtagagatctctgagctattcttcataactttatctgaactctgaagcagctgaagttttttgtacttggttgaaaactgttcccccaaaatccatgtccatcaggaatctatgaatgtgaccttatttggaaacagggtctttgtagatgtaatccaattaagatgaggtcatgctagattagagtgggcactaaatccaatgactggtatcataaaaagaagagggaaatttggacatagagacacacagagggaaaatggctatgtgaagaaggaagacgagactggagtgatgccacagctctaagccatggaataccagggactgcctgaggccactggaaacaagaggcaaggaaggattcttccccagagcctttggaaggagcatgaccctgcagacaccttgatttcaggcttctgtcccctggaattgtgagagaataattttctgttgttttaagccacccagtttgtggtaatttgttactagaaaactagtacaaaattcatagtcccttcatattcctcattttccttgttttaaggaagacttaattgtaccttttaaaatttatttttacttattttagagacagggtctcgctatgttggccagcttgtcttgaactccttgcctcaaacaaccctcctgcctcagtcttccaaagtgttggaactacacaggcctcgtatctttcataataaaattctttcattaaattttaagagtccactaagatcttcatgagctcttttccctcctttttcactttactgtgggattaatccaaaaccctttgcccttctcttcattctttctcccactgggaccactcccaatctagtgattttaatcactgcttctatgttaacttctaaacctaaatttccaactttgacctatctttttacctttaaatcctatgttttcagtaacagtaattttaaattctgtattttaaaaaatattataggcatttttctagcaagagccacatagccacttagcccgtatgctaaagactttacatacatgttaaatattcgcaaaaaccttatgaggccattactcttattatcccccaattgaaagatgagaaagttgtgtaagacactgagtggtaaaagaacttgccaaaggtacgacagtcagtaagtagtggagctgggatacaaacccaccatagtgcgctttaagcacataggcaacccagacctctttgagaatatggtgaaaactatggtcgttcaccacaaaaataatacaaaaagtttcctataaaatattagaaagttcatacatctcttagaagtctttatggatcccaggttaagaacacctttactggattagccgggtgtgatagcacatgcctgtagttttaggaggctgagatggaggatcacttgaacccaggagttcaagactgcagtgagctatgagtataccactgcactccagcctgggcaacagagcaagaccttgtctctagagaaaaacagaaattgaacaaaaaacatctgttttggaaagaactgagtcacaataaatataatagtaataagaaaaatatagctagattcaatggtctaattttcttcatcagtttgattctccaggaaagtgtaatttattttagcaaatttagtagatctttattttaaagaaaatagtgaacatcatgcttattcatttgagcatgtagtgaatgacaaatgtagtgaatgactccaaatccagaagggaagacaaaacatgtaaaccaaaaattacaatatgatgcaacagttatgacaagaacaataatctttgtgaactgtgcagaataatatgaaagaaaagtactgtgttgaacacagagatcaggtaaaaaattactataatcaggtaagaataaaatccatgcaagagatgaatatggagattctaacctaaggcagtggaagtggtgagaaaggattaaatccaagggttactaaggaggaaaatgccgtccgagtttagtggctgattaagtcaagatgaaagtgagaaaggaatgaagaacagctcatacataggatgattaggagtagagatgccattaactcagattagaaataaggagagaaaggagtgaggtggggagaaaaaaacattccattttggacacatgataaattatacagaaatagagattcagaaatagatatatagacacagatattatatagttatgtaacctaagcatatttttaggcaaaagtgggtgacagagggaaggttatcaggtataattgtgagggggttagttggataggagacagcatacctgtttctctgaaataaggggacagactgcattcagcagttccagtaacagttcaagaaacaaatgactattattaatcatatattatttaaaatagtatccacttgagtgtttgtctgattttaagttgtagatgtcagttacatatttatccaagagatccatttttttcaaaagcaaatctgaaaagcttataattaaaattgactgtagccaacatgttggaatccaaagtgtatttgataattttcttacagaaaatgttttaggcccaccaaggaatttagtctagtgtagttagaacctataatttcacactctttcagagtaagcctactaaaaaatagttcttttaataaaagtgtgcaagtgattaaatcctagtcaattacaaaatgtgtatttctgtgatggcatgtgtatttcaaagctttgaatgttaaaatgcaacttgatgctcttccttagcatggttaaattcagcatgatatcaccctttgtgggagtcttcatgagggtaaatacagcttaaataagtgaagtttcctggtattgaaatggctttgtttctgtgggtcttgatttagttttatttgtttatgcaaatcaatgaataaatatacatccatggagacaatatattcagattatacatttatatttaaaacctttctttccaactttttattttacagatttgttcaacttactttaaatcactagaatgtaattaaacactgccttctcagctggagaaaataggctgttctcacatggttaggctttgttaaataacaatagatttaaataaaacttcaatatactagaatatgtttcttgagatactatatggcttgattttataatattaagattcaaaacattggcatttacagttgtgagggaccatagaggttatcaatttgtgtcctttttcagatcaagaaatgacagttcagagcagtaggttacccagagccaagaataattatatagtggattctatatgccaagctctgctctaaacagtttacatacattttatgtattaacttattaattcttaaattcaccattttacagatgaaaaaataaacattcagaggtgaagtcacccaagaaccctcacctagtaagtgatggccctgggatttgaacccaggtattcttcctttcagtcagtgcacttaactatgctcccagtttctacaaagggcagtgttgagaccctgaaaccatttaaccttctgatatggttaggctttgtgtccccacccaaatctcatcttgaattgtaatcctcataatccccacttayctagggagagacctggtgggaggtgattggatcatgggagtggtttctcctatgctctttttgtgatagtgagtgagttcttatgagatctgatggttttaaagcatctggtatttcccctgctcatgctcttctgtctcctgccactatgtgaagaaggtccttgctgcctctttgcattctgccatgattctaagtttgctgaggacttcctagccatgtggaactgtgagtcaagtctctttctattataaattacccagtctcaggtatttctttatagcagtatgagaacggactactactactattactactactactactacacacactcacatatgttaggtgtaatatactgattttgttgaattacatttatttatgtaaatgccaatctctttcactggactgagaygttcgatagatcttcgatagcaggaaccatgttgtattcacctcagtgaagagttcattacttggtacatagtaggtgctgcataatacttttggataaataaatgagccaatttatatatgaaggatttttaggaaggtgagtctagaggtaaggaaacaagttagatggagagtgatctctctttgggaggtaatacaaaagtcaggtggtgaagtgattttgttaagggaaaacattgaacagatgagaaagacattgcaaagattggagttggtgattgctgtgagtgacagagaaatcaaaacaactatatgaccagttcagtctatcacaaaatttattaatttgattaatcttttcaaagttgggctgaaagaagatatcttgtcttgtttgttcattttctatgcattgaactataccataaattttgtcatatccttccttctgcttattttaggtttcatttgttcttctttttctcatttcttcaggtatatgcttaagtcattaattttagaactttcttcttttttaatataattattaaatgctataaatttccccctaagaactgctttagctatggttaatgaggttttgatgttttcattttcatttgattcaaaaaaaattttttgagacagagtctcactctgatacccatgctggagtgcactgttgcaattatggytcactgtggcatcaaccttcaaaggctccggtgatcctcccccatcagcctcctgagtagctgagactacaggtgcatgccaccatgcctggctatttttgaaatatattttaaattatttatgatttcttctacagcccatgattgtttagaagggtttttttaagtttctaaatatttagagattttttcagatatctttctgttattaatttttagtttaatgcaattttggtaagagaaataatctatttgatttacttttaaaaaattcattgagacttcttttgtgacccaaaatctgttttttcttggtgaatgttccattggcacttgaaaagaatggatattctgtattagttagagtgttctatatatgtcaattaggccaagttgattgatagtgttgtttaggtcatctacatgcttaatgattttttttcatttactagagagaagtgttagaatatcgaactataactgtaggtttatatatttttctttcaagttctgttagttttagctttatgtatttttcagctctgttattagatgcatgtactttaagattgttatattttcttgattaattgacttctttatcattgtgaaatgtctctctatatctactatatctcttgttctgaagtctattttagctgataataatatagctactctgcctttcttttgagtaatatttacaaggtatatctttttatattcttttctttttaaccaatctctgtctctatatttaaggtggattccttgtaaacagcatatagttggatcctgctttttcagaaatccagtctgacatactttaaaattatagtgtctagagcatttagaattaatataattattgataccatttgttttatgtctaccatctatttgttttatatttatctcatctggtctttcccttttttctcttttaaaaaacttattaattgggtatttaatttctactatttgacgattttttttagttgctgatttatttttagtacatatctttaacttgtcatagtcgacatttaaattataatactcctcctatcctttatgctcttattatgtcacacattttaaggctatatatgtagtatcaacctcataatacattattatttgctttaaacagacataaatatctttttaagaaattaaaaatgagaaaaatattttttatatatattcacatatttaccatttctgttgcttgtcattgtttgctgtaggtccatatttctatctggtatcattcttctttggctgcagaacttctttttacagttgggtgggtgtgtgtgcgtgcacgtgcacatgtgtacccgtgcatgtgtatttgtgtgtgtgttcatgtgaacgtgtgtgctggactgctggtgataaattctcttgaaagaattcatctgaaaaagtcaatgttttccctatgtatttgaaagatatttttactgggtcagaattgtaggttgacagttttattttgttctgtttcctttcagcactttaaagaggtcttttcattatcttctggtctgcatggcttctgataagaaattggctgtcggttttgtctttgtccccctgaatataatgtgtcttttttcctctgggcatttaagatgttctctttatcactgattttcagcaatttgattatgatttgccttagagtggttttcattgtttcttctgcttggagtcattgagattcttggatatatctgaaaacttgatttacgtattttttttctggtttactagctgtttacagtgaaagtgcaatgcccatggcagatgtcttagtctgtttgggctgctataacaaaatgccatgaactgattggtttataaacaacacaaatgtatttctacagttctgaaggctgggaagttcacaatcaaagtgctagcagatttggtgtctggtgaggtctgctttctaattcatagatggtgccttctcactgtgtccttacatagtggaaggcatgaggcaactctccgggacttcttttataaggacactagttccattcatgagggcagagccttcatratttaatctacctaccaaagacccactttctaataccataacatggatgatgaggtttcaacatattaatttgggggaaacatgaacattcagatgataacagcaggtaatatttcatgtgtggaatcagaagtcttattttgttattattggtagaagatggctttttcacttataagtcataaacatgttattaattatgtcttccaaaattttcagattttgttgtcaaatttgagaaaacttctctcattttttcttgacttaaccacatactttcagtgcccgacaccaaaggacctgttcatataccatgaccacctctggccctgcatctttgtgtcatgattctagatgagtcagtactcagggtgatagaagtattgctagaagccagtcttgaattttcttggctagttataatataaccatatacaagactctgcaggcctcataagcctatcccattaaatccaagctaaatatatacctaactcaatctccatttagctggatctttgttgttgttttttttttttatcttagaaatggggtctcactctgtcatccagaccagagtgcagtagctcaataatagcttaatgtaaccccaaatccctcggttcaagcaatcatcctgccccagtctctcaagtagctaggactacagatgtgtgccgctayacctggttaattttttaaattttcttgtagagaaggggtaacactatgttgcctcgactggtctcaaactcctggcctcaagcagtcctcctgcctaggcctcccaaagcactgggattacaggcatgagccrccatgcccagccaggtggatatkaacattcatgtagccactccaacatacctaccatgaggagaagtaatggaaaagacataatgaaaagagacgctggtattaattgattgcagttaatatatcttactgttacaaattgtacaaaagtgtatgatcactaaatataatgctggtgtttctctctgggccttgggaggggcttgtgcagagacgccctgtcacttatgtttcattcactttacactaattctgctctgactttaccattgttgttttaaaagcaggatcattctgtgtcacacactagtataatcttgggctgtaatagaaattgttgttcagcactgaaaacaggaatgaggaaacgtgctgttaatgtgtctcttacttcagctatctgattctgacaaaatccaagtcagtactcagttatatactgtttccccagcctagtggaaaaaaaaattgagtttagtagagatttgggttaaagaaaaggaaatcccttttgcagtttagaggtcttaatgattggggccgggcacggtgggtcacgcctgtaatcccagcactttgggaaatcgaggcaggcagatcacaaggtcaggagatcgagaccatcctcgctaacacggtgaaaccctgtctctactaaaagtacaaaaaatagccaggtgtggtggcgcatgcctgtactcccagttactcgagaggctgaggcaggagaatggggtgaacctgggaggcggagcttgcagtgagtggagatcgcgttactgcactccccaaaaaaaaaaaaaaaaaaaaagaagaaaaaaaatagaggtgttaatgattacaaaacaaaaataagttaagcaaaaattttgattcaaaagtagaaagtgtatatttcatttcacttttgtacttaataagtggtatagttctcacttgtttgttgtttcatttgttccctcagtctgtcacttataaataatgaatatgtaaacttgattttcacaacttggtttgctgcaatatagccccccaaagtaactgggcttttattagtttttattgcaagtattccagttttaacagctttgatagcaactatatcttaattttttctcttataaaaatgctgagaatcccttttcataaacaagtgttttttttaaagataactttatcaacatggcaacagtctctaagtttcagatgtggtgctacttagtcccttataaagaacgaatggggtcgggcgtggtggctcacacctgtaatcccagcactttgggaagctgaggcgggcaggtcacaaggtcaggagtttgagaccagcctgaccaacatgatgaaatcccatctctactaaaaatacaaaaattagccaggcgtagtggtgtgtgcctgtaatcccagctactcaggaggctgaagcaggagagtcacttgaacctgggaggtggaggttgcagtgagccgagatcataccactgcactccagcctgggtgacagagcaagactccatctcacaaaataaaaataaaataaaataaggacaaatggaattcttttgcacacttaatagcagcacctagactatagtcatgtctggctgctgataggaggtttagaatccttttcctgttttgaatgttcattcctgctttgaattgttgattaagagaacagatttattgacagacttctgcttttgatttcaagtatcagtgttgattgactgtctgctgtaagcataatagtgatggatataaagccactagtaatacccttcaraataataagatttaaatacattaaaagatacaatgctgaggccgatttcagacaagggagagatctctatgacctaaagattctagaactcaagctgggctttaaggttgaacagaatttgaagaaggacattctatggtgcaagcagaaacacctaataagagtaaaggcaaagaggtaggaatgtgcaggtcttatttaattttctttaattcaacaacatatatcaaaagcttattgtcttccgagtatttttctaattaaaaatacaaaaataaatatggaatagtctttaccctctaagaatttaataatctaggaaatgggaaatgacattgacaaaactactactagatagaggatttctatgaatagaatttatatcataaccttttatttaaaggttgcctgagcaacacactttgggtcagaaagatctgggcttaaaatttagcactgcctcttcttagctatgtaaccttcagctcctttgagtttacttttatctgtgtctatcttccactgtatttcacacatacaacctgaagctcttcatcagcaaactcattcccaccaggtcagagagaatttcactgccagctgtactatcaagtaaatggaacctggactgtctttcccaccataggctttgtatcacgttgctccttaccaaggctacattaacccagtccagattcctgggctccagttcctgatgtctgtctacagtcattgccatcctgcctcaccagctaaattaactggccctgactcttctcaaaaccacatctacacttaccattcttttcaaagtagctcattggactactccaaaatatcaggatgctatcatttcagttttcttccacctctcactcacgaggtaactgtctccttttgcccaggactcgggattcctggaacttgggaatttcagtgctaaaactgggagaatcccaggtgaaacaggatgagttagtcatcctaacactagcctgcttcgggcctctagcccttgtttctgaagtgtcgacatatctgctgcttaacctaatccaagtttggcagtcttctcaattttttggtggggacggggaggtgggatggggtctcattatgttgcccaggccagccttgaactcctgagttcaagttatcctcccacttcaaccmcctgagtagctaggactacaggcgcacatcactgcacccagctaccttcttaatattttgaaggtcaaaagacattcatatgacagctgattcccaaaatgtattagttagtactgagaatgccaagccagtttaaaactaaaagcaatagcaggttgcaaattaaaacttcttggtgctcaaaaaaaattaaggacttggaacggcagccagatggctggggtgaaaggtttatatgatgtcatagataaagctggtaagtgggtttgaccaggatcccttttctgtgtgtgtacacatgtgcagatgggcatgcacgtgtgtgtacatgaatatgagggagaaagttaaatgctatgaacaaattttggaaaaatcagattgtagaactaagataataactggatatagcaaggaagagcaacttaactaggaaaatggattaattaataaattattctcaaatttatttttatcataaatttaagtaagcccttggttccttttattacgtttctatgataatctagtataagagaatacctgatataaatccaaagcaggtgattggttatttctaacttaatatatcaatatttcacaggcaagtctgagatgcatcaaataattgtcagaaatagggaaagaaagatgagtgggccgggtgcagtggctcatgcctgtaatcccagcactttgggagggtgaggtgggaggctcacttgaccccaggagttcaataccaacttgtacaacatagtgagaccctgtctttgtttaaaaaaaaaaaaaaggatagtagaagcatttatttagaacatttgtgcaattgatatttttaaattaaaatgttttagaaacttttgatattctttttcttcacaactttataattggtcttgcatttgatgactttaactaaacatcaataaacatattacaaaatgtttaaataaattttatttatttaaataaaataaaataaacatattacaaccacagatttatttccataactgattttataaaaagttcccttaaatagtcaatgaaatgagtttcctaacttagagcgctttttttccactcagaactaattagctatgcttaagactttctcacaagaatttctctacagaggaaacagtactttcactttgaggctctccactagaataaaactatctatgggaaggatcatgtcccctctaccatccccattttcatataggcttttaaatgttcacatataggctatatgtttcatataggcttttaaatgtttaaatctgttggtgttcacagaactgccttttctaatgcaatgattttgaggcaagatgatttggggagacaaaactacagttttactaagtaaatttgggcttctaagtcagtaacaaagggcatatcagatattcaaaaaagtaaattctgaatgtataagttcagggggtttctattaccatattagtccttagctgttaatataccacaatagagacaattcatactgagtatacagttacagataaattgatcaaattcattcactcaataaatatttatggggtactttctatgtttaagaaacatttctaatcactaggaatattgtcaaaatattagccctgtagagtttacaaaatggctagtagaatttacaaaaatctctagccttttagaatttaaattctaatagggcagacagacaaaaaacccaaaagtaaatagtatgtcagatggtgatacatgctatgaaaaattaaagcagcctgagaaggttagggagtgatccacagtggatggggcaggtatgctgcttgagatatggtgtcaaggaaggcctctctgaaaaggtgatttgagcagagacctgaaggaattgaaggagtgagggagtgagccttgaaggtatctgaggaagagcagatgaggtaacagcaagtgccaatatcctgaggcagaattgctgggcatattcaaggaatagcaaggaggttagtttggtaggagcaggatgagaagggagagagtggcaggaaatgagrttagagaggtgggggtaggatggcagatcttgtcaggtttacagtctacagaagatattttgggcattcagtcccagggagatgcctttagaagtagaaagttgcattttttttcttcaatttttattttgagctctggggtacatatacaggatgtgcaggtttgttacataggtaaatatgtgctatggtggtttcctgcacagatcatcccattgcccaggtattaagcccagcatatattagctatttttactgatgctctccctccctccaccccctgaacaggctccagtgtgtgctgttcccttcaatgtttctatgtgttctcatcgttcatctcccacttataagtgaaaatatgcagtgtttggttttctgctcctgcattagtttgctgagtataatggcttayacttccatccatgtcctgcaaaggaggtgatctcattcctttttatggctgcataatattccatggtggatacatggaatattacattttctgtatctagtctatcagtcactgatgggcatttgggttgattccatgtctttgctattgtgaatggtgctgcaataaacatatgtgtgcatgtatctttataatagaatgatttatattcctttaggtgtatacccagtaatgggattgctgggtctaatggtatttctgcttctagatctttgaggagttgccacactgtcttccacaacggttgaactaatttacactcccaccaacagtgtaaaagtattcctatttctccacatgctcgccagcatctgttgtttcttgacgttttaataatcgccattctgactggcatgagatggtatctcattgtggttttgatttgcatttctctaatgatcagtgatgttaagctgtttttcatatgttcattggccacatgaatatcttcttttgagaagtgtctgttcatgtcctttgcccactttttaacgggattgttttttcttgtaaatttgtttaagatgcttgtaaactctggatattagatgtttgtcagatggatagattgcaaaaatgttctcccattctgtaggtgaggattgcatttcttaactaaaatgccctcaaaccaaattgtcacaatactggccttaaccaagccatttatgcccggtgttccattttttgattgccacataacattatgtgaaacacaataaaaactttttctcttcaaattcttgttccttaaatttttgcaggttacatatatgaattttatgcaaaaattcaaaaaattgcaacctcaggcataaatgggttatgaagactaatttctactttaaattatttttcaaacttagatggatcatcctataagcatattaattcaatcttggaaaagacttgcctggtaatatggcagaagctctagttgtcaaaaagtcttagaacagcttgactatttctcaggttttccatctttcacatctctaaaatgttcagtgcaagtttttagtgaagcagagctgatatttttgtaaacttatggtatattattgataattttcaaataagagaaaatctagtctattagctagaatagtttcatttacttcaattatttattcaataaacatttactttgcatttattatattccagaattgtattaggtcctcaaaatacaaagatatagaaaggctttttcctcaaaacagattcgtaaataaataattgcaagatgatatggcaagtgcctactatatagtagttgctcattagatacttgtttaatggatgaatgatggtaggaccaagaatgaaatgattatctttgtccgaggaagtcagagaagggggaaggaatcacttttgaccattagctccacgggaaaatggggaaagggcattatcttgttcactccagcatctagcatagaatccagcaaataatcagtgcccagtaaaaatgtatggaatgaataaatggatgagtgaatgaggggatgattgaacaatgtctaaggcaggagtaaaatttaggaggcaggagcacattgcttgtaaagggaacaatgtatacagaaggcacagagatgtggaaatgtattattccattccagtaataattttggattttcatttaaagtactctgtcacatatacactagagacataattgttggtacacatgcttctttttgtgtatttcgtatgaatctacttgcatctagaaattttctacaatgctattggtagatgtatatatatattagccagatgaaatatttatgtttttagcacagaaacttgtgttgccacaacttattttaaatagtatatttataagcaagaacaactctgaaatcagaacagataacattgtcctaataatacaaagattaattcacagagcacatttggtgggaaaaaaattatacattttgccacatagtaaagagtattatcttgtccattagttgtgcagttaaacctttatcaaggtataacaagccctcaaagtgatttcaattgaatgacaaaagggatggaataaaattcatttaaaactggttcacaccagctctcctgcgtgttctattaactgctaagatcaagtcacaaaacattattttgaggagaaagggtttagtgaaccctagaaattgggtttgatttatgccagaaaatctgccttttcactgcttgagatttctgtggaagaaagccacagtcttttaccaaatggtttctaaggaaaccccttatagcacagcattggaaaacaatttagttgttaatgagaaatggttctcacggtgggaaagtgttgactgaaagaaaaggcttctggagttagcggtcagtctgtaaaaagtgtttaccgctctacagttaacgtttatgaaatttctacatagagcaaacatttttaggtcccattttgcagttattctcgcttgtaaatatattttttaaagaagctagggcaatagaaaagtttttgtctaaaagtttagatacttgaacttgcaaaaatatattcaaacaagttgtcttccagaatctgtgcactccggtgaatttttcagttttggaattgcaacattctagaatttatatgttagcattaaaatataagtaaattaattttgcataaaatatttctaaaaatcctaaaatacagtagggtatttatatatttttaaaacattttaaaaatgtattctgaaatgtcccataagttgtatttattttacttctttaatttctgcataaaaataaaataattaattgcaatgaatattttaactataatccttttataagaatttcaagattaaattttaatatctaatgaagcactaaaccttgtagttaaaaaataaatgctaaatatatacaaattcttctaaatgtacctattgaagccagattccaaaataactacacctgtattttcctgataatctttaagtagtgaaagccaaggaaactcatgcaataactttaaatagattttcatctgtagcatgattcagaaacatgaatgaatatatgacaggaaccaaaaaaagtgaccatcagaaaagttcagaggaaaatatttagaaatatttcttgctttgggattgttataagttttcaagtctgtttaaaaatataacactcagttgttaagtcacttgaaagcctattggtacatcgctttgccgaaagctgccatcagtccatctgtccacaagtgtgttttctgctttagactttcatacaagacagagttgccaatagtcttcatgttgtcttccgttgttttcctcatttgacccccacctcctttctctttcttctctggtctttgaacttcctccactttgggcagctgctttcatttgcagctctgctttgagcaaggaaaaaattctgccaatgaaaacaggaaaaataagaaaacaagaagggttgcaagtgttttgcatgtgttgcagctctccggctgtccactttggggtcttctcaccattgggtagtatactgagaaggaatctgttgttggaaactgaccctaggtgaccagagcttatctaagggacactttttttgtcatcttagaatcaataaatttataaatcatttgtgttaaaagaactgtgaaagtgatattttatgtttactcacccactccatattctgaggtatatatttatcatttggtctggtcagatctatgatattgtcaagttacagttatatatatatatatatatgactatatgatgtatatataatattttagagacagggtctcactctgatgcccaggctggccttgaactcctgggctcaaacgatcctccagcctcagcctcccaagtagctgggactacaggcgcttgccactgtgcccggttataatatttttgattaagacatttgagagggagagaatatggcctttttttttttaactctccttcattccctacaatacacacaaaaacccccacagggcaggaacttctctaactttctcagagtagtatatgatagatatgcatgtacaatacatgagagtacttcataaatattagttcatggagataatgaagaaaacatcttttctaagtcaaaaaataggaagcaaattcttaatagttgctgttattatgccaatatgcttgagtttgaagtttagtgagatcttttttgagtggctaaaaaagggaagagatgtaagtcttgtcttcgttgataaaacatcaggaggatagattgatggtggtatctaaataatatactcaaaattagagtgtagtttctgccttggcacatctgtcttgtttccacttctttgcttcctcctttttccacagtatccactgcagcaccacaggatagctccccagataaggcagcaatctaatggggcagctgtagatctctgtgttagaattaagaaaggagtatttgtcattacttatgtaacccactctgcatccacactgacatatatagctgaatgaagaaatcgctcaagcaaaatgttgcctccctttgaccttgtctgagtgccattcattgttgttatcagagctgaacagtaaatggcaggaaccacataagagttgtaaacaagtacacatgagaaaaagaagtaactgtatttgctgagtcaagatccatgtaaaggagaggatcacatttccctttcttggaaacacttgaaaatatttacagtctcaagttcaatttaaaatattcttattaagtgtctactctgtgttagactcttcactagtaactgtgaatacagagataatgaagtatcttgctcatggaagaactcacagactagacttatgataacctctcttctccttagaatttggaggactttagatggtttcccctagatttttgttttgttgcacagtgttactcttattctcttaatctctaatgaaaagcctatttggtggtatagtacgagtcctaatgatgaatgagtcctaatgataaataagacatcattaggacttctactttttcagtctgttttacgagtcccactccactagactgggaccttctggagggcaggttccagaaggtcccagtctagtggaggagtgagacttgtaaaatggaagttatagtacaatttttatagaaatgatcaaatcatattctttctgaaacacttaacttctgagattgatagatcttaccatttaaatgagtatacacataaggtgttgtagcattgtatctggcagactgagaggacataaaagatgttaactacctgctttaccattattacctttacctttcctgtttcactgttcttatgccagatattgaatacaaatctagcccttccatatttgacctctttaaatgtctcattaacaaatgtcagtctactttctaggtgacatgagactccttatgtatcagcatatcattatcacttctgttcttccacagttcctgaatatatcacatgtggtgataaacatgaagatgtatgaaaaattgtgttcgttgagagaaaatggaaggcttttcattctacttccacattttcattccagcagcttttctgttttggaagatgagtactgaatcttgcaatgaaatttttttaacttaaacaaggtatattttagcgtgttccgctatggatgactgtctgatgccgtcatgaatattcaattaacttttattttatttttattttattttatttatttatttatttttgagatggagtcccactctgtcgcccaggctggagtgcagtggcatgatctcggctcactgcaacctctgcctcctgtgttcaagtgattctcatgcctcagcatcctgagtaggtgggactacaggcatgtaccaccatgcctagctaatttttgtatttttaatagagatggggttttaccatgttggccagtctggtctcaaactgctaacctcaagtgatccacctgccttggcctaccaaagtgctgggattacgggcgtaagccactgtgcccagccaaatattcaattaactcttagatcagcgtttctgaacctcagctctgctgacatttccagccagataattctttgttgtgcgggctgtcctgtgtgctgtaggatgtttggcagtatccctggcctctacctactagatgacagcatccctgcacatctctgacatccaaaaatgactctagacattgccaaatatccctggggggtaaaatcatccccagttgggaaccactgcttttgatcatctggccattgatttttggccaataggatggagctatgtgactacaagggtgtgtggcctttcttctggtaggtgtaggacttcagtctgccatgctccttcatatactcagtgcctaatttgtgcaaggtagcagcaaaccatgaggagaaaggtggtccatgtcttgaagaaactcatagtctaacaatttgtaaactaagttgatttttcaggttttggaaatatgctaggtgattcttgataattctttgaagtggtaccttgagcttcttagatagctgtgataaatttccaaagttggatattattatgtgttatcaaaatactttcaaagcagtggaaaacccctatacttttcttgaaatttttcattgaatagttgactcttgtgtaaggaatagattgaaatttgcagctttgttttactgggatatttgcttgttgttttaatgtttaagccttatccctccaaatcttttataaatcaacacttgtattgtagatttggaggataataacagcacctgtcctgatacatagagttcttattgtttagacagctgtctacactgaacatcagctgtctgtactctgatttcaggggtgtgtatgtgatctaggtttggacaataaaaatattgaaccctccttccctggacctacaattgtttaagggaaggaracatgcaaaagttggtataaatttcaattctaaaagaataattgtacaataaaaaatcttacaatcgtgtaactgaagctaacgtaagtgttcagcttactatcaagtacataaaaactttaaaaatcctttaaaaataacaaaaaattccaaatactgtaatyaagcatttgattcatttaaaatcaagtatggagcaacatacaatatagcatttaatatcacatttgaactggtaaatcactaggacaacttagttaaatagtaataaaagaattaatccccaggattatagcatttctgtggcatttatctagtcctttgtacataacaaagtgattcagctcttcattcataaaactgtgttaggaatctgagttgtatggttttctgtgtgacaatttagacattttagtctttgcattccaaaaacactaggaaagttgttatttgtttgaaacagattccaatgatctgttctaatttattctgatgaaaagggtaaagggaaatttctctgacttctaaactaacttgagagattttcctattgcctcagtctgtcctcccacccctaaggtacatagaaagacagatatgtgtgtacacactataacattgtttaaatgatactcatattattgttctgaaatagccatactttaaatgatttcagataattggcttcagttttgctaatataatttatgtaagtcatatggctaggtcaaatttaatagaaaatttgggaagaaagatatttaaaaatatattttatgatgaaaactatcttgataaatttccttgtttattttatatgataaaaatcattggttgctccctaataaaatatcatttmacttacattacagtgctgggcatgtattacaagttgctcatttttagagctaatttatgtagcatatttgcatgtgtgtgtgtaaaagattgtgacagagataagagaaataagtgaaacgttcacttattcacaatataagtgaatataatctattaatattcaaattaaaaactagatagcaagtcagtagttcatttagttgagaaacttaggggaggatgggcaactaacaataacggtactattattatcattccttttttacagacaaggaaaatgaagcgcagagacgttaaataactctctcaaggtcatgcagctgagaagagatgagacttgaactccagtgccagccctgttaatcactattctgtactgtctttcaggttcttatgcctttgtttgaaaaacatggttccctgtgaaattttacaygtagaagaaarcttcacactacgagagctctcaggatataattatttcagacagatactgggaacataagatggcttatcaatctaagatggccttcctgtccttcggattgaactgaaaccatccctgattccagggataggtagatgatccaggtttggacaatcaaaatattgaaccaccctggacctacaagtgtttctgggatgggaacatgcaaacgttggtccaaattgttgttctaggcagcccagtacatttctccaatgcctggtaagctctaaatatctctaaatgtttgttgcagaatgaatgagaataaaagtattctcttagaacatatccctgacattaggtgtgggataaargtggaaaatgcagtttgcctcataaaaatagctttcagaaatgacttttctacaacagccattcaccagtattctaaagggcacctgtcaaggagtcactgcattttcaaaagtacatttattttcacatcactggccaaagttgatctattatcatcacattaggcccctagtatagagatggcccctaaattagaagcagatttgaattgttgagacctaaaagcttagttcccttagaagactttttacctgagggcaggaggtatagtgaggatcacctgctttgagtcatactggcctgaggttgaatcataactttgaagtcaactgaggaattgcatactatgcatagcatgaccagcggcatactatgcaattcctcagttgaccgagtaattatacccacccataggattgttttgtgagttaaaggaaagctatatatacttacataaaataagctgtattattttactttcttttacaactctcagttgcagggataaaagggaaggaaagaagggagggatggaaggaaagaataatggaaggaggaaaggaattataaaagaaaattggctaaaaaaattaactcattactaaaatattaagggttcaaacagtattctcaggacttggtatctgcatttctacagcctatttttcttaatacttgctttaactgtcaaaggagttatttcctaatgtcatcctttagcaactctaaacttacatcttgccattttctaatataacataaaaaagagcaactctccctgaaatacctatagaagtcttggcctcactttgatgagacaaacttgcatgtttctgttcctaaaacaactgtagatccaggggggttcaatattttgattatccaaacctagatcacatgcctgtccctgaaatcggatagtttcagctcaatccaaagcagggggaccgaaggcacaggaagcacggttgtccaaagaaaattgttgatagtgttaccaaaagaaaggggagtgaatgttagatggtaaaatcagaaaaaaatgtccactacactgtcacttaactaaatagcagttattattgtgttttgtgccacttacagattcctattaaacctactactacattttaaaaaatcgctctatttaacaactttattcagaaaatatatttagatttccaatttgggatattgcgatacatcttctacctttgcttcaagatgaatataattagcaggaattccttaacaggcctatgtggaactctcatttaacttttatgagcctcagttttcttcccattgtctagagagttacccaaacaattttctttacttttggccaaggtatctctgctccctgcagaatataacagattgttgtcttataacttttctccttttctcttgttccagaagcaacagttacttcttttaggctattttctgtttttgtttggttttgttttgttttcttttccctcaaactgctaataactatatacataccactacttctcgcttctctttttttactttggctctagatggaatgatagggtatgcataaatgttcatgtgggctctggagtataccaggaactgaagtaaggtacatggacgtcttgaatattgtaactgagatgggcaagcctacacctttgcaaataaaggaggattgggaaagattaaggtgagctttctcgcaaacagatgggtcatgggaataaggaattctgaatgcatgaacagtgatgctgaaaagcagggggtcttcaaactatactcaagggccaaatcattgcctctttttataagtgaagttttattagamtactgctccacccattcatttaaatgtggtctatggctgctttaggacttaaaatgccagaatacttgtgacagaaaccttctggccctcaaagcctagaatatacactatctggctctttaaagaagtttgccaacacctgctccattgtaaggaggatattagtcgggttctaacagaattkcttgttgaactagggtttaaaacacatggtagagactccactgccataaccagagagaagactgccaagaattaggctaacttgttctcaggcaaaaaggctacgtaaaaggcagaatctcagttctgcagggccagtgcaggaggtgaggaggcaggggttacactggtgtccgtgggtcattgttcatgcaatggatactcggtctggttgagggatacatgcaaggctagaatttgtgctgagtcaccagatttaagatctgggaaaaaataatgtacatttcttgacttcaaagacgtgggggccattaatccagattttacccttgttgaactaactcaggaatggaaaacactcttggtgaggaaatgggacactgaatagggatacttcctaccagcccaagactagggttagggaaggactcacttattggtaagaaaggatttttgcctctacagacctttacttagacctgtacttaaatgaggtaagaagtgagaaagcaatatttctcaagtgcctacaaacctgaggagtctttttccatttgtatgttactcaagatctcaaaatgccacagctctttaaaagggcttcttctctcctttgtattggtggcttgcaacatgctatttgaatctttcagcaggctgacctgtttggctaatgctataacccaaattaattgttctttcctctatgtttttatttatttatttatttatttatttatttatttatttatttatttttttgagacagagtctcgctctgttgcccaggctggagtgcagtggcaccatctcggctcactgcaagctccgcctcccgggttcacgccattctcctgcctcagcctcccgagtagctgggactacaggcgcccgccaccacgcctggctaattttttgtatttttagtagagacggggtttcaccgtgttagccaggatggtctcaatctcctaacctcgtgatccgcccgcttcggcctcccaaagtgtttttatttgatcttatcacagtagtcagcatattttgccttgtattatacttatatgtgtacatgtagtcttcccccagactagccattacttgagagcaaaattttagccttatccgtctaaatatcccccaagtgcttatctagtgaatgcctaattgtaatgcctattgacttaaatggaatttaattaaatggggtttgttatattctgctaagactgtagtagatgtagacacaagtctgattcttttcttataactaccattttcccctgttatggatatatcaaattacttaccacccttaacatctcctccagattaatttgtcttgtgtaagcccctagttgaccaaagctgatggctgattaaattcccccaagggaactcagccacacagccacataggttttttttcttttttggttgcaaaaagcagaaaggtgcgtatgcaacagagaccatcttaaacacgagaattattagagtagctcacagaaaggtatcactgaacaagcaagcttcaggaggttagaaaccaggacaattctgaggactcgagcattgagaactcatgaactctttgacccagagcaccccaaggcacctccacttaagactcaaattcgaaggatctgtgtaagccagcttgattcaataatctaattctgtgctcaggaaacaggtggttcctttttttttttttttaaatcagaatttggagttaagaggatgcagggagagtggtagacaaacggaaacaagtgttaccatagcaatctattagagggcaaactaagccaccaggagtctctcaagaacaaacaaacaaacaaacaaatgttatgaatgacttttggcttaaatgtcatgtagactaagactggaggcgcaatggagaaggagggaaaactgagagctgatagaagcaaaatgaaggataggagtgagcatcccctaagatggacaaggtgccttcatttcctaatggtttctcctcttcttttctttgaacctaccaatgtgtggttattttccttgcaatattgtgttgtaagatatccttccaatttagaaacagaaaggrtagtaattgcctcatgttagaatatttagctatagaataataggaatcaaaattattttagacatcaaagagtatggaaaatcaaagataatctgaggcagcaagacacaaatcccatttgtcaattctgccatttggtgatcatgatggtagtgatttgagatatgtctagctaagtaccaagcactgttttaagtatttacatatattgttctctcaaaaactctgacgtgtaggtagaattattagcctcattttacacataagagagctaaagtatacaaagaataagtaatggagccaggattcaaatttcctaattcaacatcaaagcctaaattcctgaaagtgcaagtctctcacaaacttcaggaattccacagcataccagaaatcttaagttttagggtggttcgaaaccttataaatccctttgagtcaaaaatttctctttttttccagatcctgttaaacgtcagtgttactatttagcctttgatatctccagtaaaggcaacttctttctggacccagaaataaagctttacattagcagcttccataacaccaataacatgaatgaccatctactgagcaattgcagtgcaccaggattatggcttatgagcactttatgtttattatctcacaactcactgagttagatactctccacaacccagtgaggtaaatactattacttccacagtatatattattatataataaaatgcttagaatatacacacagtaactaaacactacttataaaatatggctctagatatgtttgataaatatttccttcatgaaaacatggaggaattaattagcagtatctctctgcagcctttagccctcgagaatcatgtagaaaagaggagctgtcttctcttttagcagaacatctgtcagagatggtttcccctgacttagacaattgtgtttttttccctwcagaatgattgagtctcagaattgttctttaatcctcagtatttccattaagaagagcttctatcaagtgcttcaaaagtacccaatgtgaaggagtaataatgactccctgctggtgagcgaagtgtggaggacacaggtccctcagccgtccactggatgctgcactgtttggcctgagccaacatgggcagaaatacaggcggcagcataagcagatgccaagaacctgtcttgcttctactgttttcattgggttrctatatctcctttgtagtccaacctgcaaattactttgagaaggggagatacacccctggaccaatctaggactatatttgttcccttgctaaagtaggaaaaaaaatacagaacctttaaatattgaactcaagggcaactaatttaaattcctttcctttcatgttgaaagtcttttgactgggttattctgaagccatagcaattaggttacagtttacttctctgttactttaccatctttaaatttggcaccttcaaaaggttgttctgtgcgtttaaaaaaaaaaaggaactaccgttggatattgtattgttgatgaccattatttgattctggattcttttgtgtgtttgtgtttgggtgtttttggttgttgtttgtttgttttctagagacggggggtctcactatgttgtccagactagattcgagcccctgagctcaagggattctccagccccagcctcccgagtagctggaactgcaggcacccgccaccacgcccagggacagttacttgattcttaatagtccagtcataatgagacaggatactgcataagccaaagaccacacaaagtatcaatgttaagtatcaagagggtgtggaggaagtgggttacaaccactttgtctcccaactgttgtatgttttgcctttaaaaatttttttaagtacgttaaattctaatgtactcagatgtggctgaaacaatgacaaaacattagttttctttaaatatgcgtgacttttaagctttttccctttcccagtgacttgcttctccactaagctctttttttcttttttttttttcctcaaatattattgtttcatgtcactgtgacaagtttagtctactggaaattcctatgtcctctgtaatttaggttttaagcaacatatgatttatcttgttattttaaaaaaactatctgccttccctaagtgggcaactctctggcatccttaatattcttctatagaaattgtgatgaaagaacagataagcctaagtaaatctagcgtgtggagctcctttaaaatgtgaagaccttgccaactggttaaaaataaaacttggttttgtcctaaatatccttgctgggcctattatacataaaaaaaggggccacagcccatttgcaaggcttctgaatgaactccattcattctgtacttggaaatgtctcttcagccacaaaaagaaacaatagttataacctaatttctttggtgccaatatcagcagaagaagagccaagagaccattatgaaaactctagtaagttctcttggtgattatataatgctgtattcattgatcatatttctgtatttaaataagtacattttttaaaacatcataaagtggatcagtaatgctgtaatatcacatttcatgtattatacaacatttttgaaatggagtactccaaagtaatttgcttcttatggttaccaaagtttaaagaataccctaacatgcactccaagattttaagaggaaaggctttgtgtttttcattactgtattttgaaatctgagagtgcaaaactagttttcttaggtaaaccccgtaatcagtttccacatttacctgtaaaagtcagtggagggcatacatctggaagtagtagtggcggtacacaatgtgtgttaatatgatttccaaggggtatctagagtaaactttcttaatcacagatctgatctgagcatgccactcctttcttaaaatcttttgttgattttccatttccctaaaaggaaggcccactggagcatgggccttgcaaagtcctctttctggcttctgcctgcctgccttttcagcttcatctctgccatcttccctgaatgaacttttgtcagtggcctcgctctttctacctatgagatgttgtttctgcatgttcttgcatggaattctcttcctcccaaccctgtttcattcctttaatctgtacaactctttcttatcctgaagtctttatgttaaggttgccttttcaggaagacttttaattgtattagctaattaattaattaatagtctgaggtatttggagctgagattctatggggattagttgctggagggtagtttagagccagattgtgaaggactttctaaactgtgctttcaaggttttgaacaggaaaatgatgtagactttctgttttttgtaagtttggaggatggcttgtgtcttaaaagaatatgtaacataaccatctaatttgtgagtagtggactaaggaaacaccactctaacctttttctctctgcgataatcccatcttcagcctctcaagcactgtgaaaaatcactttctcttgttgtattcttggagcccctgctaattcattattgaaaaatacctgctgcctgcatttggccttatgttgtcatttacttggtaagtaaagctaaatataatattaactaaaattaaaagaccattaaattattggatagtgtctactatagtggtttagagtacaggctctagagagatctgatttaaaagttttgctctgccacttgctagcaatatagatgtggacaggctatttagataatttacttagcaaaataaacttgractgaagggtaggagattgaggcaaggaaggtagaccctaaagcagtttgccaaatacaaaatctcttggaatttgagagtgttatctaaaaatccatgtgaatcttgtattctcttccataatacatttctgtttgttttaatataaaaatacttttaagttggaggagggggttaagtgggttggtgattattgcctcaaattttttatacaattatttctccaggaaaacacacactgtttattcatggcttgaagcagtctttttttttaaacatacttttatagtatacaagcatgtgaacagacatgcttctggtaacggaaattaccagaaatgtaaatataatatctcattagagcagaaattctgcattgatcttcagccactgatttacagtgtttaccccaatattactatattctagataaaacgttaaaaatctagctcaatagtgttacaaaataaactgattatttccttcctctcaccatatatacatctagattattccattctttctagttactctcacaggaacctcaagaggcatgctggtttatctcttttcctgcctccccccagatattttagttaaatattttactctttatacaatccatcttaaacatgtaattctttctatcacttcttttctgtttatttcatgcagtcagcagtccattttaggcttttgccattttttcttgtctgtagtatcactgtgagttcaagaataagttttctatatacattctctttcctcttttgcttagcctatgaactgtattcctttattgtctctgcatcaactacaaagttaagtattgatttccaaaacaggcctgccttccccatattatgcttaccttgttttccagcccaatcttttccgttactcgccttaatggtccatcctttatagccaaaatgaaccttccactcttccctgagcatccactgactcacttgtctccaggcctcagcaccaattatccccactgcttatcactactgtgtacattgcccaaagcctgtctcacaggcctcctcctcctccataaatccttccttgatcatcccagctgaatgtgtggggtctccctctcctttcattgtttcatttatggaacagatatttatcaaatgcctaatgtatatcaagtgataaactaatgatggggatttagcaataactaggacagaattattacccactctaatggaggttataatacaacacaaaagtggcattgataactaatttcaagtttcacgcattttccaagggtctgtgcatggcgtttagaaggctacaccttaggctgggggtcaagaatgtcttccctgatgtgaggtttacacagagatctgaagaatgaagagtccagctaagttaagtgggagcggattaagggaatgcaaggacatgaaagagtgtcctaggcagagggaacaacatatacaaaggccctgaggtgggagtgaacaaggaactgagagaagaactgagagaaggccactgtggaaagccagatgctgtgtgacatgaataatgggacacaggaaattgagatattagcaaaagagagattgatgacccataggcttgaagatgtactggaactaaagtaaggggcgaggataaataaaaagagggaraaattggagaaacagagtgcttggaagccctgatgaatttgaggaaaaggatggtgatagagttgacctagccagctagaagagtagtactttttagtcagtgagccctccatcccatttctcattaattcttgtaacactttctcacttcctatattctgtcatattttatagttgtttatataattatcttattctttataccaattgtagtttccctgggtgcttattatggattaacaattatattattattaataatatgggtgaatgtttacaaagaaagaagtcttttttgctattcttattttatttctttaatctttgatcaggggtttttatttatgaattcatcttatatgtcacttgacaaacactgaatgctgaatgccacagagtacatgacactttagcagcataaagaaaggcaccaaaaccaagcagcaaactacatgctacaaaacaacaatttttggaattaatgaatgaggctaattttctggagtcctctctctcttttaaaatgtaagaaktgttagtatggccaggcatggtggctcatgcctgtaatcccggccctttgggaggccgaagtgggcagatcacctgagatcaagagtttgagaccagcctggccaacctggggaaaccctgtgtccactaaaaatacaaaaattagccaggcatggtggcacgtgcctgtaatcccagcaaattgggaggctgaggcaggaaaatcacttgagcctgggaggcagaggttgcagtgagctgagatagcaccactgcactccagcctgggcaacagagtgagactcaaaaaaaaaaaaaatgtaggaagcgttagtatgtctaggtctattcacaggtttggaaggagaatggggatagaagacagagcagaaaattagtggtaggattcagtagatcagatctccagcttcttagtacctttgatatttagtccagttattgaatttctcttcaattcttcagtcagaacttcttttcattccagtgggattgcttcacacttaagagaattaatgtacttatacaaagccattttcagaagggaatcactaatattattatgatgtaaacaaatgatactaggtacttttcccttaaagtgtctgttttaaacacacatttgtttttctgctacatcgagttcattgaatctcatttgtattttcttcgtatgttaccttayacagttatacgcaggatgtccctgttttttcagttagctgttagataaattcaccatacattcgctttcaaccttgtgtttaaaaaaaattagttacatgaagtagtcatccacatgacataagagacctaattttaataggaaataatattaaaaatgtaactcctagaaaatgttagtgatcatcatcttcctttattttttttcctaggtacttcctaagcgtggctactccaatgaagctttagtatatgtactgaaagaagatcctctcatactgccacagccaagagataaggttgtaaatctttattgggagaagccgtcaaggacagttctgtgaaatgaaaggatctctggatcaccacaaagtctggctcagtgactatggctttgcaaacactaaacattcctgtctcaagtcctgtagatggcttgaaatagtatacataagcatgccttataaacatcttcagtctttatcaactctttggagattcagccattcttttttgtactttagggaattaaatcattttataatgtataaatctragcatggccgatggcagaagaaattttgtcatacgtttttaaagaaataaaaatgtattatgttttaaaattcctttaactgtttttcttacaaaactcccaacaacttagttaccaagtaaactatctcagatatgatttttcagtccttgctaatctatttataaaatcttttgctattttataatcttattatttgtgtctgtccttaagtgttcatttgtttttatgtctgtgtatgtcatgtttatttgagctgtttaatgtaaagtaaaacaagaactccctgcatcttatagcataaaaagcaatgtttttcatattcttaccctaatagaaaccctcattcacagagtgatggctaatgctctacctttctgcaattcctagtcagagaactgtccaagtctcacatgacctgcatcttgaagaagaaacctatcacgagttagttcttagctatacaggttaacaaactcaaatgacccactaactaaatcttgattcttaacaaaaacactatggtctatcatcataacaatgtcaatttctcacattatcattttgaatcaacaatatgccatcatatcaaagagaacttatcatattagcatattgaatataaaattacagtgcagctagttccaagacctgaatgagtgtggtatataaaaagagcagtggattagaaataaggcaatctgacgtgcttatctcagttctgctgatacttgctatgtgtatttaaggctaattatttaaatgggctttatttaaaaagggaaaagaagtagaggcatgcccattccttttaagaatatgacccggaatttccgtgtatcatctctgctcatgtacctttggccagagcttaatcagtttgtcccaggtagtaggaaaggaggctggaatatgtggcctttagctgaaacttcgaggattctaaaggaattggactattgaaagacaagtaatagtctttgccattgctctcttatcaggaaagcaaatgttctttcagaccctcctcccctgccccactgagtgattccatcagatgaatcaccatctatggcagatagacccttatgaaatctgtatgcagcagatttctacttaggccataattgagcatatagttactcctagatttaaaaaagctggggaagcaggaaacaggattgacatgattggctttgaccaaagtttcacagactttcttggtgcacagctcccttgggttcttaatttttttcgtggtaccaaaagaaatacataaaagtttcatatacaattcaataagcatttgaactatgacacataaattgaaagagaagtaataccttgttcattcttagataaccacagttactactgggctatatatacctgttgggcactctacaacttctcaaaccttggactcagattggatggtgccaccctatgtcttgccagacagtgcttgcttttcatcacagcaaccactgaaaacccagctttgcaatgacatcaatgacataatattctaaagaaatgtagcatggtctaatgtggaaactgtgaatcaccccaagctaatagtgggcatgctatctgccagaagttaagtccctatttcccttgaaaatttgaatatattatagctcccccagtgagtttactttagcacccttgagggctgggcacacagtttgggaaccatgggcttagactaatcatcgtttattttctgggctggacatattgctccctagacaagaattagttttttagaggggaagaaagaagaatggaaaatatttaggaaaccgactatttctgcctccttctattccagctaaactacatgatctttaagaagagaggctatgtctgtttttacacacttttctgtggcatagttctgggtatttcaaagaacatagaggcttggtacagtggctcaagcctgtaatcccagcactttgggaggctgaggtgggcagatcccttgaggtcaggagttcaagaccagcctgaccaacattgcaaaataccatctctactaaaaaatacaaaaattagtcaggtgtgatggtgcacacctatagtcccaactacttgggaagctgaggcaggagaattgcttgaacctgggaggcggaggttgcagtgagctgagatcatgccactgtacttcagcctgggtgacagagaaagactccatctcaaaaaagaaaaaaaagaacatacatatttattaaatgattaagaaatgaagtttatatgatcaatgaaatatgattaataacattaaccaaccataaaatgccagattataggaaatttgttgcctatacaacaggcttctgtgtaaattcaagggcctggactatgccttcctaatttcttaccaccagtgcccaataattgtttggtatattgtaggtgagagaaaaatgttgttcagatgaattggtgaatgtctcagtgagagctagttctgttcccaaacaccattacaaaggagttgcattacactgctaatgaaaatgcttattagtggactcttaatgtaaatgctcatgttgactgccaagaaagaaaaataaccactttatcttatcactatggatctagggctttttttgttaccacagtcaccactagaaaaactgacaaaaagagaaaagcagaactattctgagatataagatgaacttttcttagaatggtttatattgtcagcagctaaactgtttcagtattcaggattattacataaagccgggaaagtgactattttcaaaagagctaccaaactttatgacagtcatttgagcaaaatgtatctttctcctttttcttgttccatagcctaaataggcttttctctgttttgatggttttgccattcaagctcattctgttttcttgggaagctatgcaagctctttggtttctgtgattgtaaagtgtatggctctgtgacaactccatggaagaatgtgtatgtgcaagcgctttagatttgtctagatctaaaaattttctatggttatttgagttttttcagtaatatatttagaaaattatttatgtctctgtctgtattactaaatcaaaagtattttgaaggcagggactatgtccttttcatttttgaatccccagagcattgcatctgaacccccaagacctggtacatagtaggtacccaattcatatttgtcgagttaataaactctttcttagcaaaattttcccaatagcacagtacagagtttgttcatgataaatactgaatgtatttttattttgtgagagcctaaatcatttttaattctttcaatgtttctgaaaactaacagataggatgtattctctctcttttctatatggaaaaatataattatccttaatgatggataccaaatcttgaatttgtactatacaagaaataatttattgacaaaatatcttaaaacattctttgtttttttgaagaatattagatttctttgttaatgtatttcttttttaccagtttaataaaagcttttgctgggcatttctagatgttcaggggccagactgatgttgcagttgtatgttcctagattttatttcaaaactacatttttatttattttttgagcatgaaagtaatatatgctcagtgtaaacaattaggtcattataaatatatttaacaggaataccagagataacttctgttaataattcaatgtattactacaattttttctatgaatttaatataataatattgttggaaattttgatgtaattatttaagtgaaattgaatcatactgcacatactattttgcagttttttaatagtgtatttaaacttttaagtgcaaaagattttcaagactagcaaatataaatctaccttattctgtttaattgctggagcctacttttagatgtttacagtaccctatactcctactttaagttacttacaaatttaaatttgtaattaagttatttatataattgtaggtttcatatctgtatccctaaatagattataaattccatgcctaacccatgctgcatgaaacagatacatataatggcaataggtgctatgaatgaatgaactagtaaatggtggtattcatcccagaactttctttacaaagcctgtgctctttccacaatgccacgcttcctcctcttagtggttcctttatatattatgggaatgttcataatatcattattaatggttacattattttgagttttattacgtatgtttaggtcaattgtgaagacagaactaagcaatttagaaattcagaaatataggaataataattatatacagacataccttgaagatattgtggatttggttccagacaagtgcaataaagtgaatattgccataaagcaagtcacacatatttcttggtttctcagtacatacaaaagttatgtttacactatactatagcctattacatgtgcaatagcattgtctaaaaaagcacgtaacttaattaaaaatactttattgctaaaaattgctaacggtcatctgagccttcagtgagtgaatctttttgctgatgggggtcttgtcttcatactgatggttgctgactgatcagagtggtcaagactggggtggctgcggcaatttcttaaaataagacaatgaagtttaccgtatcagttgacttctttcacaaaagatttctctgtagtatgcagtgtttttttgataccattttacccacagtagaacttctttcaaaatttgagtcagttctctcaaatcttgtcactgctttttgaactaagtttatataatattccaaatcctttgtcatttcaacaatgttcacagcatcttcaccaggattagatttcatctcaagaaatgactttctttgcccattcataagaagcaactgctcatccaagttttataatgagattgcaacaattcagtcccatattcaggcttcacttcatattcttattctcttgctatttctaccatatctatagttacttcctccactgaagccttgaacccctcaaagtcattcatgagggttggaatcaacctcttccaaacacatatcaatgtggatattctgacctcctcccatgaatcacgaatgatcttaatggcacctagaatggtgagtcctttccagaaggttttcaatttactttgcccagatccatcagatgaatcactatctatggcagctatagccttacgaaatgtatttcttaaataataagactcaaaagtcaaaattacttcttgatccacaggatgcagaatggatgttgtgttagcagacatgaaaacaacactaacttccttgtacatctccatcagagctcctgggttagtaggagcattatcaatgagcagtcatattttaaaaggaatctttttttctgaccagcagttctcaacagtgggctaaaaatattcagtaaaccatgctatagacagatgtgctgtcatgcaggctttgttgttttatttatagagcacaggcagagtagacttcgcataattcttaagggccctagggttttcacaatggtaaattagcgttgccttcaacttaggtcaccagctccatttgcctctcacgagagtcagccctcttttaaaggtttgaagccagccattgacttcttctctctagctatgaaagtcctagatggcatcttcttccaatataagattgttttatctgtgctgaaaatttgttgtttagtgtagccaccttcatttatagtcttacctagatcttctggataacttgctgcagcttctacatcagtacttgctgcttcaccttgagcttttatgttatgaagacagtttcttgatctcatgaaccaagctctgctagctgcaagctcttctactgcttcctcacctctctcagccttcatggaatagaattgagttatgaacttgctctggattaggttttggcctaaaagaatgttgtggctggtttgatcttctatccagtccaataaaactttcttcatatcagcaataaggct

SEQ ID NO: 96756 - DNA, 27871 bp, Homo sapiens
tttttgcatacattgttttgtttaggtagattcacctctattttacaaatgaagaaactgagtcacagagaggcccaaagggtcattcaatatgtggttcaccaaagatttgaacccaggctgcctgatgccacagcctctctaagtaatcactactgccgtcttacaaacactaggtgtagactcagctccaccagacacccaacatgagacctagacagctccactaggctttaggatgagactgggagcaaggggtgctctttgtagatggtggctgggaaggccctgcacttacaagctgggtaacagtgagtcatgtttacccccaggtggagccagctggactggaggaggtgatcacagatgctgtggctgggctgccccatgctgtacgagtcagtgcccgggactttctagatgctggcacctggagcacctggagcccggaggcctggggaactccgagcactggtgagagacaaagccaaagaaaagggcagaggccccatcccaaagcatctatcagctgaaccagttccaaaagacaggcaggtggcacatgccctgcccacacaggcacggcaattgctgtcccagacttcagacttgtttgcctacagccctgtcttagcttaagtcctgccccttggcctccacccctgcagttacaggctccacttctacaagcttggagcttgccatgctccctaggagctggccatgccctatcaggctcctcctcctaggtaccttgacttccaacctaggccttggccttgagcacaggacgtgacccccgtccccaccagcgtatggacacttattgggtcttgccttcctttagggaccataccaaaggagataccagcatggggccagctacacacgcagccagaggtggagcctcaggtggacagccctgctcctccaaggccctccctccaaccacaccctcggctacttggtgagcttgggcagatgggcaagacttgtaaaggactgaaaaccccagagaaaaggggacaccgagcttggtcaggcttgctctcagtgacatgtggccctccccctcagatcacagggactctgtggagcaggtagctgtgctggcgtctttgggaatcctttctttcctgggactggtggctggggccctggcactggggctctggtaagtgactgccattggtccctcagcctctgatcctcacacatgctctgatgcccatagaccacattcatctccacccttcatgactgcccgctgaacctgtctgattctggaactacctccccatacctccatcccccatgccccacttgattttaactgattcctctcctgaccctttactaataaaccctttggcggagactgagataacccacattgttggagagacagctgcctttctatgccccaggctgaggctgagacggggtgggaaggatggatccccaaagcctgggttcttggcctcagtgattccagtggacaggcgtccaggtgagtaggacatccagaagatttggacttggagatgtttgcccctattttgagtgtccagattaagagctggctgccctagtcattttaaaacatgctgggaatccaagttgggtctcctcattttaatgatgtctaggctgagggctgggcctttcattcttgagtccctgggctcagaagtgggtctctttccctcctctcagggtactgaggaaggaccccaggtggacttcccttcagggtattagtattagtactaatactcttccagggtattagactcagagctggatattcatccttttttttcaaggtgtcttggatcagtgctaggtcccctccttcattcttaatgtgcctgggcccagagctaggtccactcccgtatcttcagtgtgttgaagaggctccctcagagctgggctcctctactcatcttcagagtgttaagcttagaactgagtcacctccctcattctcagggtgtctgggccaagatccggtcttactgtctctcctgatttgcctcctgcttcttctaggagctccaaacctgtagaggacccaggagggcttcggcagattccacctataattctgtcttgctggtgtggatagaaaccaggcaggacagtagatccctatggttggatctcagctggaagttctgtttggagcccatttctgtgagaccctgtatttcaaatttgcagctgaaaggtgcttgtacctctgatttcaccccagagttggagttctgctcaaggaacgtgtgtaatgtgtacatctgtgtccatgtgtgaccatgtgtctgtgaggcagggaacatgtattctctgcatgcatgtatgtaggtgcctggggagtgtgtgtgggtccttggctcttggcctttccccttgcaggggttgtgcaggtgtgaataaagagaataaggaagttcttggagattatactcagaaattattatccaatgctgctttattatttggctattgggggcttcagcccattttccttagcatcccaaaattcagcttgggcagagtcccatggagctttctctcttggtgctcaaaccactgtgacaggctggggttctgggggtggatgcagatgctgcgttgagccaggtgaagcctgggtagagaaaggtccaaagctatgaccatagcttggggatgagattagggtcatccccaatgaccctaattaggggttaggagcaaggaccagatgaaaacctgagttggcaacagaattagcagttagggctggggttgggatcagcattaggggttgggactgaggtcagagtcaggggtatcaggggtgggagctcacacgaaagcctggaggtgacagtccccgtcagcctcctgcagttccacctggatgaccttcctcagtagcttgtctgagagtggctttcggtagagctgagtacagcaggcagtgctgggtggcagtaggaatgctaggggcaacagggccatgtgttcagagggatcctgaccaagaacctctctgccagacagctggaggttaggttggatttcctgggtcttttcaacttcatcccattcacccagacccccagctttctatacccccaagtactcacctgctgtagggtctgggctcaggagcaatgacagcagcaggaggctgcagaaggttgggggccccttcatgttgctcagcctagactcttccttctctctctctcctcctcccctaccttttatctgggtgccttttacctggggcactaggtgagtcagaggcagttggagatgtactgtgtaacctgtgacactcctgggccctaattctcggcctgttgccacagactccttcctcatctaggatagccatttcccatgtgctcctaagctctgggcagtgaagctgggggaaggattagtgtgtgatgtagggactgatggaacagtgagtaagggcagtcaagcatccacagcagcatctaatgatagacattcacactcaaatacgcatagccacacattcaaagtcactcctcaatcacttggtcaacctcacaaagtcatactcatgatcagacaaccgtagacaaaattatatagccccggttatactcaaagtccctctcccacccaattgtgttttcacagtcatccaatcacaagcaaattcacactagcacacacagattctgacaggggagttgtgggtggggtgggagcagagggcaggcaagcaccaacttgccttcaccttctcctccccacttcctggcttggcctgcctgtcttatcagaagaaatggatgggaatgggtccctagagcaggcccttctggctgaggagggttcttggctgaggccagccccattcagagaagctgggggaaggccctttatggtaatattaagggtgttttggagatgctgaggtggggcagctttccccaggatgatgagacagggaggaaaggtggggtagataaggagggaagataaaagctctttggtgctaggttactgttgtcaaaacaggtaaaaggcccagtgaatcttaccttcctgtttttgtctagtcctgttccaggaatgccaacctcttgccagcaggggcctagggtctccagatccagtccctgacttgttgaagacattggactcaagcactcaattacatctttgttttactcaaattccagcctccttcctgggcctggaggaacatcccctctccctacccgggttcagtcacaccctcatgtccaactgctataccccctgcatcccaccctccagctatagccgcttctctcctaatcccatacccagctgtcactccgttctttaccccctccccgcaatgcaaagctcctattcatctttatccagtcctttccaggaagctgggagctgcctagggtgggggtatgctgccaagttcagtgcccctggctcctttaagaatttcccactcctggtccagggatctcaatctgcaagtcctgctctatatttgaaacataaaccaagtcataacacagtaatccagcccttatcttgttgcagtcgtctgctgtagggtcagccactctctatggagtaggctttctcttgggatagggcttaggcctttctcttgtgtcccaaggcttgttgggtgtagccactgaggaaatcccaaggaaatctcccaggttcctcgggcttgtcatagaccttcttcatcacttggctgtgcgctacatactttctggtcttccctgggcttgtcggtccagaagtcttcggaaggcagaaaacaaatgcttttgggtgtgcacccatctctcccctttaagaccaagtcttctccccagccacaatctgctgtagctttggccccagccagaaactgggccatctctttctttaacttaatcttgtggtgccctttctggtgctgggtccagtccctaactgaaggcaggcccacatagcagtccctgattctcaccacttgaggagttagtgggtcccaggctgattgggtgacagaagggggcggcagagagcagtggcccttggactctcctagggagggagcaagaacttctaggtaggctgatgccaaggatctctaaacttgggatcagactggaggagccaaaagttggggtatgaactgtaggaaaggtcgccaacccaagtcgctcctctgtggcaggcagcttctaggaatctccccctcttatcatttacagcctgcatcctacacctctgcttaaaatgttttagatatactcccagcagagaagattcttcagacagctggcaaagtcctcgctccgaggaagggagtaacaggcaggattatttagttctcttcatataggcgactcacagtatgggtttttgggggttgggattgggggagacagccattgatagtaacaggaggcctgacactgatgaggggctttgacgtggaagggcacccttccagggagggacgccctgtcagtacggaacagagcccgtgtggggaggggcgctcggctcgaatggcgacagcggcggcagagtcaggaggtcagtacggtgggcttcggtttaaatctttaatgcactggctggctgggcagcggcggtggggctgcggcgggggaagccacgacccgagcgctggggagtaggacccaggccgctggacagacagctcatcaggcctcgcagaggctccagcttctgctccccggggtgcgccgagctgtggggcgacccgacactggcatgaggcggggcgggagctaccggattccccccgatgggtcctcagagactgagtcccgtccatgcccggggcgggtccgcggtatcgcagcctcctcacctccgctccctccgccacatgcgaagccaggggaaaaagtagaaacagccccagtagatcctgcagagagagggcagagccgggcggggcggggcggggcggggaggagctgaccctacagactccgccccgcggtgcctcgccgtcgaggaaggctccgccccgcctctaaaagcggctcccttcgcgcccacgcccctgggaggctcgccctgcccacccctcgcccccgcagaactccaccctcccccaccccggagccgcctggttcctcctccgcagaacccgcctccactcactcctcctccgcctccagcgccacctcgtatctcctcattcccgacatgtcctgggctccgaacgtctcctggggagcggcatgattgaatcagggattccctagccccaggtccccttctccgtcattctcaggacgaggckgcccagttctcaggtaatctgaggctgatgcccccgagaagcctcagttgccaccacgggacagggtgggcttggagatttgggaggcactggaagttaaggggtgaggaggccggtcatctccggggcctggggcatttagggggccagggcgagaggtttggcggtcatggggctgggagatttggggccctgggtgaggattttcaggggctggggtcacctggagggggggctgagaggggtcagcgcagcctaaactcccgccctccctggctccaccccggaaacggaccgttactattacgtcacagggatgccgttgcgcactaggtttgcctrtcccccggaaggggtggggtgttcatgtctcccagaggaggcggagtcgaaacgtcatcttacggggtgaggccaggggcggrgtcggttgattaagatgcgggcaaaggaccctcttttataggtgtcaggtcaggttttggagctacaccttggggggccgaggcttccgcagcaggcagcaagaaaagagagttgggactaagtccagtactgttttcttaatccccacgtctcctctacccctccctgggcttctgccctgccgagtgcctctcttgcctgccttcctccccttgtatgaccctgggccgaggaggaataggtcctcagatagagtccagtctagaaaaggccaggctacggaaatacctagttgagtggcctcggctaagtcactgaatggccggagggtcattgcccttcctctctggtctgagacctatcttcttgtgattttttttttttttttttgctacattcattcaatcaacaaatatttgctgaatgaccacctgtgtgtcaggcactgtgctgggcatggggatgtagtagtaaagaagacaggtggccgggcacggtggctcacgcctttaatcccagcactttgggaggccgaggtgggtggatcacgagttcaggagttcaagaccagcctggccaagatggtgaaaccccgtctctactaaaaatacaaaagttagccgggcgtggtggcaggcgcctgtaatcccagctactcgggaggctgaggcagagaattgcttgaaactgggaggcggaggttgctgtgagctgagatcgcaccactgcactccagcctgggtgacagagtgagactccgtctcaaacaaaacaaaacaaaacaaccaacaaacaagacaggcaccttgtctgccctctgagaggtaggggtagagctgggaggatcaaaagagaatagtgagattcttactataaatggagcaggctggctggaagaagtagaaggtgtcaagaaagggcaatcaacccagtgtgggaggttggaaatagctgccccagagctctgacatcccagtcaaggcccagtactgagctgtagtcggtttgagtaaggggaaagacagttttggggctgggctgactgtataggagggagtgaccagaaataagtggggtgaaagtttcctctggttgaaatgtgaggaatggatacccctcttctctccctcatcccaccctctttctccctctcattcttgtcttcccttgtctgagccacatasagagagcagacagagagatccatgggtgctaggtggttttattggaagcactgcagtctgggagttcagaagctatgctttcaccacgttcaccctttcactcacattcacactcatgttgacactccaggcctggctgggtcaggtctggtgccgaggaactagaggcctggtcttcccttctggtccttggttccccaggccagggctgtctctggcactgtcatgggctaactgctgtggctcttgctctgggaaaggaaggagaggaagggccatgggctgtaatcttagacagggctcagagggggcagacaggactggggagggccaggctttccttggcagaggtcttccgcagtctccagtttgtgcaatccatccagggctggtctagaggctgcctttcagtgtggtgaatctggagtcagagagaatggagccatagaactcatcttcctgaaaggccctggtgtgaggggcagatgctggggaccagatctgggaacctgttttaggggcttccttgtgggagggattgggcaaggagaagtgaaggaagtaacatggtgaatggagacctggatgatggaggaagtgattgggaggggaggagactggacattctccaccccgactcataggacaaagtgccctgcagccatccctgaagaggaggtagcagaaggcaccaaaaatgttcccaggaattrggtgttgatttgctaagaggcagagtccccagagttgttggtatctcccagagctagggagtgagtattagctttagggcttaasatgggaaggccatagccctgactggaacttgggatatctgtgtccagagctttagtgttgctctctactccacccacatgcactgttctcttcttcctctgggaagtccaggctagagagacagagcctataaagagaagagcagccagaggctccaggacccatccaggcactgatacatacaggaacagctggggtacaggcacatctacatcacacaggtgcacacaaagggcataggcatacccacaccacacaggcacacacatagactgcaaaggaatacacacaatgcacaggtatacccatgtcacacaggacgtaaagtcatcacaagggcacacccatttggcatatgtacagtctcaggtgcatatcagtctcagracctggatgttgatattgtgaaaggagaataaatctcagaacccccaaatcattcaaccaaggggaaagtcaagctgggaattgtgtcaggcaaacctgcctcttgttttattcctaaaagagatagctacaaagaaaaagctacatacctccctcacaatttgtccacagggaaattccttatgggcctcaagatctttaccttaaaacagttgtgctgaatttcaccctggcaatgtaaactgatagcttatcttcacaggtgcaggacaatagacagaactcaaagtcatccctctgctcacctgagacaaatgtgtatctgattgctkcttctgccctatttttatgcaaaaatgcagatccactgagccagactaaggcatcagtgtgactattcctttactccccactccatgtaaattgtgtattcagtgaaaggctgatcaaagaccccmaaaaatgcagccttttgtctcttatctacctatgacctggaagcccccacttygagttgtcccgcctttccagactgaaccagtgtacaccttacacgtattgattgatgtctcatgtctccccaaaatgtataaaaccaagctgtgcaccgaccacctttagcaygtgttgtcagaacctcctgaggctgtatcatgtcatgagtgtgtgctcaaccttggcaaaataaactttctaarttgattgagacccatctcagatacttttggattcacaacatgaactcagcttcctttacagacccctgagacctgcacattgatccctgccatgcccctccgtaccgtttaacccctgccccattttactcactcatggcaagaaaaccaatatgctgagaagaggagtgttgccacacacacaagaggccatggaggatgagcagagatggacaaatgaggagagtccctgggagcagcaggtgtgcatgggtgtgcaggagtccttctgcttgtgtggagtctgtgagactgtgtgtgaggttggatggggagagcaagcaggagagggatcatgatcatgagggcgagggagtccttggaagactgagggtccatgagtgtgtgtggatctgtaggaggctgtggctgtctcctatttatggccccctaaaactttcattttctacgttcagaaacttccttccctaatggtgtgtaataaagaatttgactgccttttgtccctggctcctgagagggagactaaacctttggaatttcccaagtaataggagtgtctttattactcatgagccccttggaacacacctgggtttatgctaagagatgagatggctcaggttagaggttggtcacagtaaagaccaaccatgtgattagagagttgagactttgggccaggctgacctctggggaggaagggggcgctggagattgaattcaggtatgtggccaataattcaattatgctgatgtaaggaaatctcaaaaaaaactctggacaccaaagctcataaaactttctggttgatgaacacattgatgtcccaggaggctgatgcaccttatgtctccacaaggagaaaccactgagagaagctctgcatttgagaccctcctagacttcatcctgtgtgtcttttcatttggctgtttctgatttatacccttaataaactaattaaacacagcactttcctgagttctgtgagtcactctagcaaattatcaaaactgacgggttttgggaacttctcagacttgtagccagttggccagaaatgtgggtggcttggagaccctacttgtggctggtatctaaactggggacagtcttgttggggacctttcccttaaacctgtggaatctggtgctaactctacgtggctagtgtcagaagtgaattgcagtccatgagttggtagcagaatactttcccactggatagctccccatcgcctctctctccctttttgtggaggaaactcttttctctttcacaactctccgcagtagactgcacctgtttttcactttttggcttcagctccgagaatttcagcaataagcagtttggacaaggggaggagagtttgcactattaccattaggggaagatttgcaaggtttgtgatgttgctcctttggaggcatttgagccatcagtctcaaggctgggagtcagggtttggttcaagattagggtcagaggtaggaatgtgtctcctccctaggttcctcactgccagctcttctctgtartactaagatacctgggagtaggaggagtgggaaagatgggacatagccacccactagattccctgagggacaatcacaagagcagggtaaggatgagaaggtcctctcccagattctccagacctccctgggcctatcacagtgcctatatatccaccatctgagatccattcctcccttggaaagtgaagctaaakggaacattctttggaagcaggttcagctcccctatctctcatctctggactctaggacttcaccttcctggcccagccagcactgtccctctcccttattgacccattttcctatgccccagagctgagttagaatagctggaggagaacttggcctagaacatgcccattctctaccgtggcctccctatcctgggaattgagagggatttttgaggagagggtttggtctgctcacagagtaacaggaaaagaaaggaatgagggagtcctgagaagcaggcttactgtgtactggttgccaatttgtctgagtccagtgggagaacacatccaacaagttatatgaaatggatttattactctcaggtaggcagcaagggaaacagaatcccaggattaattgtgaggcagcccccaaggctcaggaaagctgcccagggcagatggcttcatctgcctatgctgcacttgcactgcagccaaggactccagaaagcagcctgccttgggttttataccccagggcaatgtgaattcctgggctaaaacattgaaggatattgtttctggggtgggactagaagagagcctgttccttgtctgtttctgtcacctcttccttatctcaagattttgcattccaagtgagaaagggaggagaactgggtcagtgtacggtcacccagagaactgttctgccagacccaagagatagacctctcagaagacactattgtggagtgctattctgtttcccattccagatctagagtatatagtggagcagatttaattgcctgtatttttctgcctcatccatccatccatccatccatccatccatccatccatccatccatgtgtctatatgtctactcatctttatctcttcatcagcccattcttccttctttcatctttcatttattttttcatatattcattgtgacctgttcatctgtatgttcaaccattattcatttattgtttcccttcatttgtttgtctctcagttatggtaataattaacatttatgatacttaagtgccaggcaccatgcaaaatgctttaaattcattgtctcatgacaaatctatgaagtggattgctgtgggctgtttttgttyatgcagaccacttttctacttttctatacccctttttgtggttcctgtaggaaactcctttcccacttaacatggtcttggtggggctgtcagctacagtgctctgatcagagtaccccttttcctggccactgtgatagactgaagaactgagtatgtatcacaagtacagttaaccagagctttctatgagatttgatgtttggatgctaggagaaagagagtctcttttagatcaatcaatataaaaatttaggcttaaggcttctagtggccatatttcttgctactagaagagcacctgtatcttagaccattttctgtttcttaacagaatacctaaatctgggtaatttataaagaaaaataatttatttcttacagttatggaggctgagaagtccaagattgaggggacatacctggtgagatccttcttgctggtggggactctctgcagggtcgtgaggtgtggcacagggcatcacatggtgagggggctgagtgtcctagcccgtgtcttttcttaggaagcctctagtcccacacccataataacccattactccatggatggattcatccattcatcaaggcagagccctcatgacccaatcactacttaaaggccccacctttcaatattgctacatttgggattaaatttcttttatttatttttaatttgttatatatttttaagagacgaagtctcactctgtcgcccaggctggagtgcagtggcatgatcatggctcactgcagccttgaactcctggtctcagccagttcttctgcctcagcttcccaagtagctgcgactacagctacaggtgtgcaccaccatgcccagccagggattaaatttcagcatgagttttggaggggacaaatattcaaaccatagcaacctgtctatgacaggaatgagatccctacacaaaaagattagtcagagcatggtggctcatgcctgtaaacccagcactttggaaggccaaggcggacagatcacctggggtcagaagtttgacaccagcctagccaacctagtgaaatcctgtctctactaaaaatacaaaaattagccagtcgtggtggcatgtacctgcagtcccagctactcgagagatgaggcaggaggattctctaacctgggagcgggaggttgcagtgagccgagatcgtgccactgcactccggtccgggctacagagcgagactctatttcaaaaaaaaaaaagagaggaattgaggtaagagaaggagataacaacatttcaacccctggatccagccagggttgcagataatcttctccttaatgagaagcttttttgttgttgttgtttgtttgtttttttaagatggagcctcgctctgttgcctagtctggagtgcagaggtgtgatctcggctcactgcaacctccacctcttgggctcaagtgattctcccacctcagcctcctgagtaggtgggtgccacagcctggctaattttttttttttttttgagacggagtctcgctctgtcgcccaggctggagtgcagtggtgtgatctcggctcacttcaagctctgcctcccaggttcacgccattctcctgcctcagcctccagagtagttgggactacaggcacccgctgccamacctggctaattttttgtatttttagtagagacggggtttcaccatgttagccaggatggtcttgatctcctgaccttgtgatctgcctgcctcggcctcccagagtgctgggattacaggtgtgagccaccgcacctggccagcctggctaatttttgtagagacagaatttccccatgttgcccaggcaggtgtcaaattcctgaggttaagcaggccacctgcctcagcctcccaaagtgctgggattacaggcgtgagccactgcatctggcctcatacctagttttgatataacaaatttaactttttgctcaaggtgctttgaattgggtttttgccgtttgcaaccgaaaaagccctcagtaaaaatgactgtattatccctattatacagatgggaaactaagacccagaaaggttaattttcccaagatttcccagtttataatgagtggaacactggtattcggagcaaaactctgctttattacctgtatgtgtccatctgcccatctatccatccgtccatcccatccatttatttctctgaccmtctttcaatgccaagacactgaagacaattagtcttgtttcacttgccaacttcaattctgaagctgagtctggatcagggattggtaaactttctgtaaatgtccagatagtaaatatttaagattctgtgggccatacagtctttgtagcaactactcagctttgctgttgcagcacaaaagcagtcatagatatatttaaatgaataagcatggctgtattccaataaaactctatttacagaaacaggtggcaggctgcatttggcccatgggccatagtttgccaatcctagtctggatcaatggggaagacatattatgttttattattgggaacatgaacagggagtgcccttgtgtttgtactgtgattatatgcttaaacgattgtagtgtgtccttggtgtatgtgagtgattggctgtrtgattgattatgtgtctgtgtatgtatgtgtgtgggtagagacacgtaggtgggtaagggtgtcggcaattatgtgtttgtgtatggtgtttttgttgttgttgttatttttgttttttgagacagggtctcgctctgtcactcaggctggaatgcagtggcgtgatctcggctcactgtaaccaccactgggctcaagctatcctcctacctcccaagtagctgggactacaggtgcgtgccactacaccccactaattttttgtatttttagtagagatggggtttcaccgtgttgcccaggctggtgtcaaactcccgggctcaagtgatcckcccgccttggcctccygcagtgctaggagtataggtgtgagccactgcgctgggcrggtttgttttctggctgctttttcaatccatctctttgtggttctcaatcygcaagggcctgcagggggcgtccagtgcctagggaaaaggggctcctggcctggactctcaacctcatggggcctgcagagggcgtctagcatacggggaaaatggagtgtgtggttcctggcctgtggaagaggggatctggcctaagtgggctgtcatgtcttgttccagaaaggggctggaaatgagcaagaaaccaaattactcaacttctgaaagtccctgatcctgggaaggggtctgcttcacttcctatccttttgcraatcctctattcatgtctggagggtctcagtccagctggaggggcagagcttggctctgcagtcccagagtgtgggtggaacattgcacagaacttctggaggtgatgggatatcaggatagggggaagtcttgagcaatagcatacaccccttccctgcgtcctatcccctggagcttgaaataacgccactgccagggtttcctcaatagttatctcctctattccctgcagtttgggtcactctgaacctcagggtgcctgggyctgggctgagcttgcttgggagaagctcaggaaacaagggcccctggatgtaaagctgagggtgacctctgctatgtggttggagatggggagccctggggtgtcagagggaagtagggaggggaggctgcctgaaggagatagctttgcaaaaagaacctcaaggatgggtgggaatggagaaaggacattccagacagaatgaacagcaagcacaaaggctcagaggagggacataagagtttgtgattaatcccaatgtaggtggggcggggaaagggctagtggtgggagaggctatatgtgtgtgggaggtggagtgggggagttatttctggtcatatataattttgaaaaattcctgaggaaggagccatggggatggccaagcccagatgttgcaactgcccttaggaaggaggctgaagtcagggctgggctgtagtagcagggctgaagaagtggcgcagataccagagacattaaagaggtagaagttgggctgggcatggtggctcatgcctgtaatcccagcactttggaaggccaaggcaggtggatcacttgagcccaggagttcaagaccagcctaggcacaatggggaaaccacatctctacaaaaaatacaaaactttgctgggcatggtggcgggcccctgtagtcccagcttctcaggaggctgaggtggaggatctcttgagcctgggaagttgaggctgaagtgagccatgattatgccactgcactccagtctgggcaacagagtgagaccctggaagagccagggatggtgtacagatctacttctgggttccaggctgcagagccaactgcctatttgggatttccttggctttcttacagatactggattgggctgtttttgcattgttataaagaaatacctgaaactgggtaatttataagaaaaaaggtttagttggctcacagttctgcaagcaatacaggaagcataacactggcatttgcttctgaggaggactcaggaagcttacaatcacggcagaagctgaagggggagcaggcatctcatatggcaggggaaggagcaagagagaaacagagggagatgccacacgctcttaaacagctagatcacatgagaactcactcattttcaggaggacagccccaagggggtggggctaagccctccatgagaaatccattcccgtgatccaatcacctcccgccaggccctatttccaatactggggatgacgcttcaacatgacatttgggcagggacacatttccaaactatatcagataccttattccaaaaccaaactcctgattctcaacacctccctcctagcttgtcttcgtcttctccccagttatccatctcagaaaaggaagccaccatccctccaggggctcaggcctgaagcctggtgtcatccctggtttttcccttgcccttatgcttcaaatataatccatcagctcagcctcatgttctacttataagtccatattggattcctcttctctattccaactgccaccacctaggttaggccagcatcatctctttcctagactactggaaaagccctctgacttccccattctttgtacaattcatttttcctgactgctgatagggtctttgtaaactgtttttttttttttttttttttttttgagatggagtctcgctctgtcgcccaggctggagtgcagtggcacgatcttggctcactgtaagctccgcctcccgggttcacgccattctcctgccttaacctcccgagtagatgggactacaggygcccgccaccacgcctggctaattttttgtatttttagtagagacggggtttcaccgtgttagaaagaggatgttctcgatctcctgacctcgtgatccacccgcctgggcctcccaaaatgctgggattacaggtgtgagccacttcgcccagccagtaaactgttaatgagatcatgttactcctcagattaaatctttcacagcacttatagaacaaaatcctcactccttcttgtggcctgcaaagacttggatcctatgattccagcctctgtgtcctacctcttcttatgccatctcctcctcgtccattgtcctctggccacactggtcattcctccttgaatggctggcttcttctcttttaggtgtcctggtggttaatactgagtgtcaatttgattggattgaaggattcaaagtattgatcctgggtgtgtctgtgagggtgttgccaaaggagattaacatttgagtcagtgggctgggaaaggcagacccacccttaatgtgagtgggcacaatctaattgctgccggcaatatgtgcaggcagaaaaatgtgaaaagagagactggcctagcctcccagcctacatctttctcccatcctggatgtttcctgcccttgaatgttggactccaagttcttcagttttggaactcggactgtctctccttgctcctcagcctgcagacggcctattgtgggaccttgtgatcgtgtgagttaatacttaataaactccccccctttatatattttctttctttccttccttccttccttttttttttttttttttggaatgacgttttgctcttgttgccctggctggagcgcaatggcgcagtatcgctcactctgcaacctctgcctcctgggttcaagcgattctcctgcctcagcctcctgagtagctgggattacaggcgcctgccaccacgcccagctaatttttgtatatttagtagagacagggtttcaccattttgaccaggctggtcttgaacttctgacctcaagtgatccgcccgcctaggcatcccaaagtgctgggattaagagccaccatgcctggctctttctttttctttttttttgagacagagtcttgctctgtcacccaggctggagtgcagtgacacgatctcggctcactgcaacctccacctcccgggttcaggcaattcttccacctcagcctcctgagtctctgggactacaggcatgggctaccatgcccggctaatttttgtatttttagtagagatggggtttcaccatgttggccagctggtctggaactcctgacctcaggcgatccgtctgccttggcctcccaaagtgctaggattacaggcctgagccatcacacccggcccctttagatatgtctattccattagttctgtccctttagagtttaaactaacacctgtctggtttgaacccccttcctgcataaaagccctacaggccagatactcacattcccagcctctcttgcatctaagaaagtccaaccaatctggatgtaccttctcagggctgtgaatcaagtattagtgatgcaaagaagcaaggaccatggggaatccattttggtggtggcagtagaattggtggcagtgccattgtctctcacttggccctttgactcatcagatccagtggtgtttgaggtgtctgtggccaattaccatgcagtatgaagcccaagagcaggttgctcacatttccagcatgcttgcttctgggtcattgtcacctttcccttagtctgcacctgcagcctcatggagagttcttgatgaccgttgactcataagccaatttttcagctgggtatatatgattctgcacaattttctggaactagtttagagtggatcactatagcattaaggccccattcagggtgatcctgaaagacagtggtgggcggatcacgaggtcaggagatcgagaccatcctggccaacatggtgaaaccctgtctctactaaaaatacaaaaattagctgggtgtggtggcgcgtgcctgtaattccagctactcaggaggctgaggcatgagaatcgcttgaacccaggaggcggaggttgcagtgagccgagatcgcggctctgcactctagcctggtgacagagcgagacgccttctcaaaaaacttccatattgtggagaggaccatgtgccagtgaatggcaggcagttctaggagctgggagcttcagtcctacaagcacaactaccaaaaatagcagtgagtttggaagagggctctgagcctcagatgagattgcagtgctggatgacatcttgagttcatttcttttatatttttaatttttatttttgcctgacagtccaaatatgtttgtatgacaccttgagttcagcctagtgaggccaagatcagaggacccagtcaacctagacctacactgttggctcacaggagctgtgagataataaatttgagttattttaagctgctaaatttgtggtgatttattttacagcaatagaaaaccaatacaaggctgggtgcagtggctcatgcctgtaatctcagcactttagaggacaaggtgggcagatcacctgaggtcaggagtttgagaccagcctggccaacatggtaaaaccccatctctactaaaaatacaaaaattagccaagcatggtggggggtgcctgaagtcccagctacttgggaggctgaggcaggagaatcgcttgaatctgggaggcggaggttgcagtgagccgagatcgcaccactgcactccagcctgggcgactgagggagaccctgtctcaaaaaataaaaaaataaaaaataaaataagaaggccgggcgcggtggctcacgcctgtggtcccagcactttgggaggccgaggcgggcggatcacgaggtcaggagatcgagaccatcctggctaaaacggtgaaaccccgtctctactaaaaatacaaaaaattagccgggcgtagtggcgggcgcctgtagtcccggctacttgggaggctgaggcaggagaatggcgtgaacccgggaggcggagcttgcagtgagccgagatcccgccactgcactccagcctgggcgacagagcgagactccgtctcaaaaaaaaaaaataaataaataaaaaaaaataataataaaataaaataagaaaaccaatacaagaagagaataataaatgtcagctaagtcccagaaccagttgcagaactactgactgtaacttttatccatattcccttccatgtgaaatgtgtctatttttctgttctttmactgactcctcttttcttttatcctcctttattgcattcttgaatataggttgttgtggtggtattactactactcagcaagattctggttttacttctcatcttgggagttaccatyaagacgttaggtatggctgtgtgacccactttggccaatgaaatgtgaacagaaatggcatatgtcacttgtggacaaaaacatttaagcaagaatttcccttgctgtcttccttgactggagmgaccatggaagcctgtgttgagatgaagaggctgccaacagatcaaaacacttgaaaacttgagcagccacatggactacaactgtgctggagacttgcctggaccsacagcaggcttggtatgcatggggaatagaattttgttgtattacactcctcagatttggatgtcatttgttattacagcattacctagcctattctgaccaatcaggtgtgttggtggtggttaccaggtgttagaaaatagagatgtaagattacagtaaaactggagggggaaaacatgtcaccccaatatcttggatttagaagcagatgttgctatggaatgaattgtgtccccccccaaattcgtatgttaagtcctaaccctaaatgtgactgtatctgaagatggggtctttaggaggtaattaaagttaaatgaggccgggtgtggtggctcacacctgtaatcccagccctctgggagaccgaggtgggtggatcacctgaggtcaggagttcgagaccagcttggccaacatggtgaagccctgtctctactaaaaatagaaaaagtagctgggtgtggtggtgtgtacctgtagtcccagctacttgggaggctgaggcaggagaagtgcttgaacccaggagttggagattgcattgagccaagatcatgccactgtactccagcctgggtgacagagtgagactccatctcaaaaaagaagaagaagaaaaaaaaaggttaaatgaggtcataatccgataggagtatagacttagaagaagaggaagggacctctctttgtctctctctgtcacatagtaagaaggtggctggctggttgcaagccacaaaaaaagccctcaccagaaagtgactatcttggcactttttttttgaggcagggtcttgctgttgcccaggatggagtgcagtgtcatgatcacggctcactgcagtctcaacctcccaggctcgagagttcctcccagctcagcttcccaagtaactgggactacaggcacctgccaccacacccggctaattatttctatttttttttttttttttttttttgtggagacattgcccagactggtctcaaattcctgggctgaaatgatcctcctgctttggcctcccaaagtgcagggattacagtcatgaaccactgagcctggcccatcttggcacttttgatcgtggacttctaaccttcagaactgtgagaaaataaatttctgttgtttaagctacacagtctatggaattttgttatgactacctgaacagactaagatggatgtggtaatttctaaggctctgagttgtctgtctttcgggggggtgaattttttttggctgtataaacaaaggtgatattatgttaggtgatacgctcaattttctaagaagtctagggtttgggaagaaggatgtatgttgatcttggatagccatagtgtggactatagagatatttattattattattttcattgcccacaaagttagcccctttctgtgtttgagaaacttcctattatattactcttggttactggtagactttgctttccatcatagaatccccaaaagtcacatactaattttcccagccccctctgcactaggacttggacacatgacctaggctttgctaatcataggactgtgaataggaaactagtagtgatgtgaaggagtggggttattagagaatccatttttggtggtggtagccgtggtggtgaaagtgatgtctattttacaggggcagctgtagctatgattccagaggtggcatctggcaggctgaccacctaacactggtgaggcttggggcaatagtacaaatggaggcccactatctaaatatttaaaaggtaaaaatcaagcgaacaagttgtcaaataaaaaatgtgtctgtcttccttaccttgaaaaatatactttctttctttctctcttttttttttttgagacagagttttgctctgttgcccaggctggagtgcaatggcacaatctcagctcactgcaacctttgcctcctgggttcaagagattctcctgcctcagcctcccaagtagctgggattacaggcatgcgccaccatacctggctaatttttgtatttttagtagagaaagggttttgccatgttggccaagctggtctcgaactcctgacctcaggtgttccacccgccttggcctcccaaagtgctgggattaaaggcgtgagccaccatgcccggccaaaatatatactttcaaaacaacttggaggctaggttcaagttgagaattcttgaactccttggagatccatgatggaatgaggtggtaaggggagagcccatcaccagccctccacttgtccctctcctcttcctatccacagttctatcctgcaccatgaagggtctcacgtgtctgggtgtaaacactccagccccatacatacaagctccttctacattccctgcaaatagctacttcttggctaccctctggacctggtagtgtgtatatcagtaacatagtctatcctaggaagaacaaatctgaggaagaggcccataatgatattggaagctacttgggggcatttgggcaggaaattctctgtttttcaattcctgaaatatggtctagaagaaaagaatgagttctgggtgggtgctcccttggtcctgtggacttttttttcctgtgtccagagatatgattagaggagggccagatcagggtcatctaaaacatgggatgcagggcaagggccccagttgtctggacataagcattgtcctggccacttggcatcgccttttggtggtgccaccatgctgtcttggaggcctatctggaccatctgtactgtaccgtatgctctgggagtggttctggctgcctaggctcacttattctcgctattttctgcatcttcccagggtctttttaataaactccttttctgttggaatcagccagtgagtttcagtggcttgcaagtaagaatcctgatccacacttttgtttatttgccttttgtttttggaggagagggggaagcttcatgaagaccaagaccatatctatcttgttcactatcgtatcaccagcacctagaatagtgcctggaatgaataagtgttctgggttgcagacagtgatgaggcatcactttagacgtgaggggttttcccagggctggaaacctatgtgatggcagcgctgagactactgggggccttacactaacattcagagtgatactctggcactcagtgctgccataccaggagccatttacgtagactacagagaggatggtgccccctggagttgtgcagtgctgctgtcctgcctcacaggtttaagtgttcctgacagtggtagggtttcctgagaggaatggtggcttgatagtaatggggggaccttgacattaatgggtgtcctgtcagcaatgaggacataataggcattgggacatcctatcaggaatgggggttcctcaactgatgagcactttgcagtgttgaggccctgacagaagggctggcttcctcttgggagaggacccttgaaatgatggtttggcaggaatgaggtcgacgtggtgattggggtttggattgtgttaggctcagatttccagggactgggattctgagatcaaaagccctaggagatctggttgtcccagaatggtagtgttcctgtggctggggtgaaagctttcccacctctgccaggttggagccgagggtggctcacatcttctgcatccccctggagccacggggaagacccaaaggccctagaagtagggtggggaggcctgattccctcatctaccctgatccttagaggttctgtccttgctgttttcctccaaccctgccctgcctgcccctggccccttgggagatggaagtgtccctcagaaatgggccttttgagagttgatgctgccttgctgccctcagatgctttgctcttcagaggtcctctgccacctgccgatcagacgcctggccccactcctttccaggagccctgcctgtcacaaggttccttgtcctgcctctacccctaccctccagatccccagcactcttcctacattcctcatttcctttcaatatcaccaggtcctggcatctgatactcccctgggaataggagtagggtgggcattgctgtagcccaatccccttctctactcctctgttgttgggaaaactgaggcctgagtaaactccctctttgaggctctggggaagctgatgctccttctactgcagaggcccaggaagctggaagccctctagggtgtgtctttgtgtctgggttcaagtgttaggaccccacctttggccaccagcttcctctcttgttttttccccagctctttctagcaagctgagcttttctaccccaactagacttcccagcccccagccctcagtccaagtgctgcccatcagtcaggcttagactgcaatcccagctttgccactcaccagttgagttgacttgggaggtcattctcctctgtgcttcaaattccttatacatagaatggtactaatgatacctcatgggatcgtttgagggtgcagtgatgtagtgccaagaaaggactcagcttggagactcgcacatggccagcacccaaaagtagtggctttccctatttccatgggctgcttctccacatctggccttgctgtactgttctccatttgtaattaggagataggtcaactcagagaagtggtatgtgtaatagttcagagtagatattctggagccaaactgcccagacaggaacgccagctctgccttttttctagttgtctatcctgggcaggcgacttaacctctgtacctcagttttctcagctgcaacataagaatggtaatagcacttaaagcagtgcccagtacctggtaagcgtcagtggtgaattagctaatactcagagccatgtccttccatgtggacaaagtctcagggatcacctaggaagttatctgactggagaaatgcctgctgattcctacagaggggcacttgcaggaaatttcccaattaggagtcctgagccttcatgaaactgttatatctaaggttttctggtggtttctgagtttcccgtagcctagaaggagggagtgacatggagcttgcctgccgagaagttgaatatgagatgatcaaaaccgtatgaagctggctctgaacaaacgctcaaccacacaacagagatagccccagctgtcttgagaactggatgtgctcctggtggggggcggggcatggtgggaaaaggccatgttcagttccatttttgttaatcatatgtgtattggggcttatttcatgccagaccctggcagagcaatgttagcaatggagttggatgaggcccaacctctcccttgggagctccctcaacaaataggaaagggagattttcatcccccaaaggctaagagcaacctgagaagggatgtcagatacttttagggagatattggctgctgagatattggcctttaggatgggaggtatcacccagctgcaggccttgaacctgtaacagatgccatgtgcgctagagaagaaggtgtctatctataggcaggcaacaaggcctccacatcctaactgggaagctaggagtccacaccactcctcagagatctgacaatctctggtgggctcctggcccaccagaactctggataaatgaaaatgcaacaattgtcagtgactcaccgtgaaagaggaagcagatgttgattaaatgtagtcacagtgctgagaatgttagagtggggcaggatgctcagttgctccaattgctcagattgctgggcaattgtacctggcagggagataagggggtaagacccagtgcccaggatgggttggtatggttggggggtgggaaaaagaggaaggcagaaagctaggatggaaagcattggctgtagaaggggtggggagggttgcatgccagctcccctgggactctggtgtccaccccttcagatttcctccaagttcttcatttcccaggcttccagggtcaattgaatccaaggcacttcactagctcctagattattttctctttttatgagcctcagcatctcctttgatctcagagggtggcccc

SEQ ID NO: 96757 - DNA, 16459 bp, Homo sapiens
  misc_feature (1)...(16459): n = A,T,C or G
cactgcagcctccccagtagctgggactaaggcacacaccaccacacttggctaatttttgtatttttttttttgtagagacggggtcctgccatgtgacccaggctggtcttgaactcctggactcaagtgatcttcccacctcagcctcccaaagtgctgggattacaggccaggcgtgagcctccaagacgggccaaagttgcttttttttttttttgagactgcctggctctgcctcccaggctggagtggcaccattacggatcactgcaacctctccctcctgcctcccaggctcaagccatcctcccacctcagcctcctgagtagctgggaccacaggcatgtgccaccacatttggctatttttgttattttttgtagagatggggtttcaccatgttggtcaggctggcctcgaactcctgtactaaatccacccaaccttggccttccaaaatgctgggattacaggcatgagccaccacacctggcttgaatttgcattttaaagaaatatccagccaggctttgtggctcatgcctgtaatcccagcactttgagaggctaaggtgggaggatcacttgaggtcaggagtttggggctgcagtgagctatgattgcaccactgcactccagcttggacgacagagtaggactctgtctctaaaaaaaaaaaaaaaaaaaaagaaagaaaagcaaaaaagagaaatagaaatataccacaggtggtctaaggaccacactctgagaaaccaactcattgacagacgagtatttattaagcagctactatatgccaggttcaagttggtcttactctagggatagagaagagaacaagaaaagtctgtgccttcatggagtttacattctagtgagggtagaaaatatcaagaatataaatacatgtagacagtcagtgacatcaaacaagtgggcggtggggacaccacatgagcatgggtggcaggagggcctctctgtgaggtcactgtgggtagacggagaagccagccagcaaactggaggaaaagcacccagacggacgtccttccctaagctccctcaacccaggccctgagccaagaatatctgaaaggaaaccaagtcaaatagtgaagtcccgccaggaccagggtaggcaggacagaggagccggtgacagggaaggctgtggatggcttcttccctcctgggcatggtgccccaagcttgctctggctgggggcggaggtctgactcccgcctttcaggaaacctggccctcacaccacctccctcactcaagcgtccctagcatctcggaccccaggactgagcaggcagggtgtgacactgcccggtcccggcaccccaggagcaccgcctggatggagggggcctcccgcgtatcctccctgatttgaggcccgggtcctcaggatcccagagaacgtgacgtcaccaaagagaggctgacccccatcccagcaggtagaacaacacatgaggaaggcgtgagactgggacctcctagcagggggtggggagctgtgtggcacagcaagactcccagggcaggtgggcagccaggacccggggctccagcgtcacttcttcttggcgcggtctgctgcgtccagggcagccatgttgcgggcggccgtgatcaggtggatgacgctgatgagcgacttcagcaaggcgatgggggcagtgacccagaggcccatccggaacagtcccacagagccaactgcaggaaggcagcaggggagtttggggcccgaaggagggggcctccatctccctgggcaggccagatccccctcccatcctcctgcccagcccctcatctcctacctaaaggtccctcagagaaatggaacaggtagaggaggcagtagaagagctcattcccagcacacaaggtgaacagagcaggctgcacacacagcaaacaggccacgttagcaagaggcaggcgtgtgccaccccctgcccccccagcactaatgaaggcacaatctcggcatattacttctcttatttttttttcttttttacagacagggtctcgctctctcatccaggttggaatgcagtagtatgatcatagcactgcagcctcaaaactcctggtctcagccaggcgtgtggctcatgcctggagtcccagcactttgggaggctgagacaggcggatcacctgaggtcaggagtttgggaccagcctggccaacgtggcgaaacccctctctactaacaatacaaaaattagccgagtgtggtggcacgtgccggtagtcccagccactcaggaggctgaggcacaagaatcgcttgaacccagcaggcagaggttgcagtgagccgataacccgccactgaactccagcctgggtgacagagcaggactctgtctcaaaaaaataaataaataaataaataaacccttggtctcacgcaatccttccaccttagcctcctaagtagagactacaggcgtgtaccactgtgcctggctaagctaattcaagattttgtgtgtgtgtggaaacagagtctcactttgttgcccaggctggtctcaaactcctggcctcaagcaatcctcccacctcagcctcccaaagcgctgggattacaggcatgagccaccatgcccagccattatctttttaaaaatccttccagaggctgcctgtgttcctggaatcaagtccacactccagccctgcagacctctctggcttatctcccttcccgctttcagtcccttctctttgcaggcctcattcccacttgttccctggagtaattcacacaggccttccccaccaatcctcctcctccacgcctcagcttacgggccctcctcctggagtgactgggcaggccctgctctgcgccctcgccttctcctaggctaggaccaggattcagcccagggcttcccacagccaagagcctgaggggtggggtgtgcaggaaatgcttaccctcgaggtgtagtagatccgaagcaccggattcccggacaagtcgatcatcttgtgactctcactgcctcggaccacagaacttggggagaaaacaggggaacccacaaggtttcatgaccactaccatgcatccaatcctcatgttaacacctattgtacagatggaaaactgggcacggctaaggaccagtatcctgccgaaagccacagttacctatttgggggcagagtcaggattcaaatgccacatttgaaagctcccatgccccttcctataagctgtcacctatatggaatcctagaatacccagccagaagagtcctaagaattgcttaatgcaactgtaaacatgactgaagctttaaagagaggcaggtttgcctggggtctttctacaaagcagagctaaaaaggagcccttccaggatgcctagtgccatcccagacacccttccatctaggctcagcccaccccactgtaatgtctccaagtggcccaggcccccagaatcgcagcagacctgtggaggtgcagccagtgactggccacatccaaactcatgctgatttggaagaacagcgtggctccagggtacagcagggccaggttgaccaacaggcacatggtggagcagcggtccgtcagcatgtccagcatggccccaaaccgggttcctggaagattaggtgggcaagggctgttatggcacagtggatgcaggacaggtgcccatatttggtttatcactctgacgcagggtgtaaacgaagactggaagtgtccgcctgcctggggaggaacgcaggctagaaaacaggctgtgtgtgaggtcagtgggcaaaggtcaccatggcatgaactgagaaaggcatgagagtggagggaacagggtaggaggagaggaaagctatgtctgcaactcatcaaccccagaaccaagactccagggctagatagagacttgatgcctcaggggaagccttacagttgggtctggagaacagattaaaaaattagtcaaccctccagaagccatcacccttccctctccatcctccctctaagcatgccttctggaaccccaactgcttatgcagggcacacagtaggcctccagtaaacacctgttgaatacactgttttttgttttttgtttttttttttccgagacagagtcttgctctgtcgcccaggctggagtgcaatggcgcaatcttggctcactgcaacctccgcctcccgggttcaagcaattctcctgccttagcctcccgagtagctgggattacaggcacgcgtcaccaagcccgctaatttttgtatttttagtagagacagggtttcaccatgttggccaggctggtctcgaactcctgaactcgtgatccacccacctcggcctcccaaagtgctgggattacaggcgtgagccaccgcccctggcctgaatggacttgtattcagagagacctccagcagcgccaccgccatgtcatgtcttgctaatccacacctctcacaagcagtgagttctcaagagctagcttaaattccttttgctacaaaatcagtccattcttgctgggcgcggcactttgggagcaaggcaggaggatcgcttgaggctaggagctggggaccaatctgggcgacactgcaagacccagtctctacaaaaatttaaaaattagccgggtgtggtggcacgctcctgtagtcccagctagtcaggaggctgaggtgggaggattacttgagcccagaagatgggggctgcagtgagccatgatcgcgccactgcactccagcctaagtgacagagcgagaccctgtctcaaaaacaaaaaaacaaaacacaaaacaaaaagccccaggccatcctgttctgctttttccagagatgggaatgacagccctctgactctgaggtcccgaggaggcaggggaagggaggaggggattgttgaaccccaaggctggctgagaggggtgtctgtcaccttgattaagagcgcgagcagcgtgtccatcgaaagcgtccagcaggccgctgagcaggtagaaggaggaggccgtgagggggcagcagggcatgaagtagaaagaaatgatggcgaagacaatccgggcataaccttggaacgggacgcggggagacagggcaggatcagggagcccgccaaggcccctcgccctctcgttcggcccggggccgtgggcagcactcaccgatgaggttgggcacgaacaggaagatattttcgtctggcatcgcggcgcctcccttgctgccccgggcctgctctggagatgccagtgctgtcccagccccgcagcgcggcctcagcctccggcccggcgcatcggccgcaccacctgcgccctggaccccgccgccccaacctggccccagatgctgaagcccgcagccgtcgggagcatggaccggccccgaggtgcgcgggacgcagggggcgcgcgcagtccgcccttcctacccgcaacctccctcgcctctgccagccccgcaggcgctccgggcctccagctgcggtcgccgctgctccagctgcgcgtggcttccgggaacctcctcctccgcgcccgtcgttgcaaaattggagagaggaaaaagtggcttaaaaaaatagttgcggcccctttaaggcctgtcggcttcctttcccttttcctccctccgcccctctcccttggctcgtaccaaagcgcagaggaggagagggaggaaggaaccattaacgtcaagcaaagttagaaacggaaaaggaaagggtaaaagagaagaccgaataaaaatctctgctttccttttgtggagggtatgacttcctggaggcaaagataaggcgataaaattcctcctcctgagtctttgcgtccccaagaggccaggagatttggtgcagtcctcactttactccccgccccctaagtctccagccgcctttgctctcgcaggctctaggcggctagagaggctccagagcgccctgcagatgggttgcttytcgcgtgccccttgtgatgggaggattaggtcgcaggctccaccctacgtcatcctcccaagcttctcaagcgtctggcgcttggggtcactgccctcaaggaggcacctggaggggtacggaggggaggctggaggagcaaacggggcgcgctaggaaattcctctgtctttagttctagaacccctgatctcctagcaacgaggctgcggaacctctgcagactccaagggttttatagcgtccggtagcgacacggagccggctcccccttttccagccttcctccccatctcccattctccrtcccccacgacctataccagaggtccttaggcctccacgtctctccttttgccgagtagcccaaggtttccacccatctgccaggtctggggcgtcaagtcggctgcctcggcttgggaaggtgcttgggagggaagaaggaaggagaggcccaccaggcgaaggggtgaggggtagggggttgcgggagttccctctcactcccgaagatataaagcaacctttattattattattattttttcttgtgagagggaatgaggcagcgggatgtttcctctaaaggccttgtttaaacctgggcccggggaatggtggtggactgggttctgggggaaagcgggctggtttctcaggtcaactcaggcttcgactgttcccagggggatggcgtccactccgatggggaatgagggggagaagaagagcagctggccatctcaagctgcaccctccttgagaggaggtccggtgagcactgcagggaaccctagaggtgrgaatgtaatgaagtgaaagcctcccaggcagaggcaccccgtgccaggtctgagccacgggccctgagactctagcctcaaccctgagtcctgaagccccgactcatagctctcagcactaggccctgactctaaacccccaccaaacccccctcccccaggtccagagctttctagctaaatctcaaggcccagtccttcaggarcaagctccttggacccacaggccccagcctgggaactcccacagccagcactcccatgtgggagctcccaggctgaacccctccggcttttcctttcccaggcttcgttatctcgttctgaggaatacctgtcccagatcagtgcagaactcatggaggaggctttgtgcactgcttgctgccacttgaaccctgtgcccatcaaaaaaaagcagtcacaagaccaagcgactcagatatccaaacgcggkaaccccctgcctcaggaccaccgtgtctagagaaccgctgcccccactatgcctggttacagtccctgacccctcccacccctagctgaactctccaggagtctgtgcccatctcatccatctcacagccagccctaggacctgtgaaatgcccctctcacccgctaacccagtacccactcctcactgctggccgagaatccccttagccccgtctgccctggccgcatctcttctggccacggggatagtcctttctctgactaggtcctctacttccagcattcttcaccaagacctgaggcacagacacctggtgagtgaggcttcaagggagatgctctttgtcctgggagagaggtgaggaacctggaggggagagagtgagggtttcacaatatcccagcagggtgggggaatttttgaaccgtgcacttccattctattctgccctgatcctcaaattctgaattctcagccctctcccctctcttccaccatctcctgctcggacagaaaccgtacctgcagcaaggcatacctcctgccaactcctggtgaaaaggtacatgcagggtccatggctgccaaggctattcgatattaaccaaaccttttgagtttgcactatatgttggtccctgtcttaggagcttgggacactgaaatgaatggtacagtctcagcccttgaagagttcacagttcagtgtggggacagacaaggaaatggccaattataatacagtctggataagtttccataatagaaatggacacagtgggatagtactcttatcccagcttcaattggacaggaaggacaggagccatggagcttcttctttttttttttgagacggagtcttgctctgttgcccaggctggagtgcagtggtgtgatctcagctcactgcaagctccacctcctgggttcacgccattctcctgcctcagcctcccaagtagctgggactacaggcacccgccaccacacccgactaatttttttgtatttttagtagagacggggtttcaccgtgttagccaggatggtcttgatctcctgacctcatgatccgccctccttggcctcccatagtkttgggattacaggctttggagcttcttgaaggaggtagcacctaaagaaataattttccaccaggtgcagtggctcacacctgtaatcccagcatttttgggaggctgaggtgggctgatcacttcagggcaggagtttgagaccagcctggtcaacatggtgacagaggttgcagtgagctgagatcataccactgcactccagcctgggcgacagtgagaccatctcaaaaaaaaaaagaaataattttccaggttaaaaaaaaaaagaggttagtaggagtctttcaagcagttggggttgcatgaacaaaggcaaagagcagtcttcgcagagccagtgtgagcatctgtgtgtatttagggcagggagaagcagtttagcagctggagtctacaggcaaggtaagaggggactcaagagactttatgtgccttgtttagagccttacacactttcctggctgggtgtggtcgcttatgcctgtaatcccagcactttgggaagctgaagcaggaggatcgcttgcgtccaggagtttgagaccagcctgggcaacatggtgataccccaggcatgatggcatgtgcctgtgatcccagttacttgggaggtgggaggatcgcttgagcccaggagttcaagaatagcctgggcaacatagagagaccccatctctataaaaagttaaaaaaattagccaggtgtggtggcacgaacctgtggtctcagctacttgagaggcggaggccagaggatcacttgagcctaggaggttgaggctgcagtgaaccatgttcatgccaccgcattccagcctgagtgacagtgcaagaccctgtctcaaaaagaaaaatttwaaaaaaagaaaagaaagaaagaaatagtaggaggagctgggtgcggtggctcatacctgtaatcccagcactttgggaggccaaggcgggtggatcatgaggtcaggagttcaagatcagcctggccaacatagtgaaaccttgtcttaactaaaaatacaaacgttaggtcaggcgcggtggctcacacctgtaatctcagcactttgggaggcccaggcgggcagatcacctgaggtcaggagtttgagaccagcctggccaacatggggaaaccctgtctctactaaaaatacaaaaattagcygggttggtggtatgcacctctaatcccagctactcaggaggctgaggcaggagaatcgcttgaacccaggagttggaggttgcagtgagccgagatcacaccactgcactccagcctgggctgcagagcaagactctttctcaaaaaaaaaaaaaaaaaaaaaagccaggcattgtgtcacgcacctgtaatcccagctacttgagaagctgaggcagagacttgattgaacccgggaggtggaggttgcagtgagctgagattgcaccactgcactccagcctgggccacagatcgagactctgtctccaaaaaattaaataaataaaaattaagcacttactatgtgccagcactgctcgaggggctggggtgttgcagtgaacgaaacagagttcctgctatcaagaggtttaaaaaattagccgggtatggtggtgcacagctgtggtcccagctactcgggaggctgaggtgggaggatcattggagcccaggttgaggctgcaggaagatatgattacaccactgcactctagcctggctgacagagggagacctgtctcgagaaaaataaaaaagacatgagccttgggtctaaagagtgaaaaggctctgtctcttttatggagctcttcctaacagtcagtttggaagatgagcccacccctctttgatgctcttggcttctcatgcctccccctttttgtccctagaacatgcctcaaaactactcttttgccactygttaaccacttccgtttgtggggacctcctggtcatgagcagcatcatcccgaagccttcaaagtgttctggattcatcacaggaccctccagcctcagccagcaaggataccaccaggaatgaaagtgctttaataaagagacagggtgtgcattgctcatgtgtggtttctctggggtagagaagcaggacgggggggcttttatttttttttctagatgtgggtgctggatgtgggcatacgattggagtgtttagtctttaaaaaaatttttttgtggccaggcacggtggcttacgcctgtaatcccagcacagatcatgagctgaggatatcaagaccatcctggccaacacggtgaaaccctgtctgtactaaaaatacaaaaaattagccgggcatggtggcacgtgcctgtagtccgagctactcgggagggaggctgtggcaggagaatcacttgaacctgggaggcggaggttgcagtgagctgagatcgcaccactgcactccagcctgggcgacagaacgagactccgtctcaaaatttttttgtgtgtgtgggagacggtgtctcactgtgttgcccagactagtcttgaactcctggcctcaaatgatcctcctgcctcggcttcccaaagtgctgggattactggtgtgaaccaccacacccggcctgttgacacagatgagctcatgggtccaaatccagcctcctggccacacgccagcaccttaaggtctaggtctgtggcatctggcaggactcctcttgcttctgaggagccacctctgccaccaccattggggatggggacactgagctatggccttgcccctctgagctttgggcttcatgcctgtgagaacatatcacactcattactagccagaaagcagtgcagtaggctttgcagtaggctaaattcattttagcatttagcatttgcattgctaaatgcaaactgcacaaagtttggccatttattggagcctcctgtggaagtcaattctcatctctgagccttagtttccttatctgaaaaaatggattaataaatgatccctgtcccgtagggtcctttagagagttaaaagacataattgagtcaggcatggtggctcatgcctgtaatcccagagacacaccggacagtatggcgggaggatcgcttgaggacaggagttcaagaccagtttgggtaacagagtgaacccccacccctaaaaaggtaaacaagttagccaggtgtggtggagcacatctgtagtcccagctgctcaggaggctaaggctggaggatcacttgagcccaggaggttgaggctgcagtgaactatgatggtgccactgtactccagcctacactacagagacaccgtctctaaagaaaaaaacataggccgggcgtggtgactcatgcctgtaatcccagcacttgggaggctgaggcgggtggatcacttgaggtcaggagttcgagaccagcctagccaacatagtgaaaccccgtctctaataaaataaaaaaattaaccgggtgtggtggcaggctcctgtaatcccagttactggggaggctgaggcaggagaatcacttgaacccagtaggcagaggttgcaatgagctgagattgcaccactacactccagcctgggtgacagagtaagactcagtcgcaaaaaaaaaaaaaaaaaaaaaagacaaaaaaacaacataatgcatacaaagtgcttgctattattgagatcagtttgcctcacattctcctaaaagtccacccctttctgaatatttcagcatcctttcaagtatcctaaaaatgtttaattgcatttaaatataaaattttattttatttgggacggagtctggctctgtcgcccaggctggagtgcagtggcgcaatctcggctcactgccagctccgcctcctgggttcacgccattctcctgcctcagcctcccaagtagctgggattacaggcgcccgccactacgcccagctaattttttgtatttttagtagagaagggatttcaccatgttagccaggatggtctcgctctcctgacctcgtaatccgcccgctcggcctgcccaaagtgctgggattcacaggcgtgagccaccatgccannnnnnnnnnnnnnnnnnnnnnnnnnnnnnnnnnnnnnnnnnnnnnnnnnnnnnnnnnnnnnnnnnnnnnnnnnnnnnnnnnnnnnnnnnnnnnnnnnnnnnnnnnnnnnnnnnnnnnnnnnnnnnnnnnnnnnnnnnnnnnnnnnnnnnnnnnnnnnnnnnnnnnnnnnnnnnnnnnnnnnnnnnnnnnnnnnnnnnnnnnnnnnnnnnnnnnnnnnnnnnnnnnnnnnnnnnnnnnnnnnnnnnnnnnnnnnnnnnnnnnnnnnnnnnnnnnnnnnnnnnnnnnnnnnnnnnnnnnnnnnnnnnnnnnnnnnnnnnnnnnnnnnnnnnnnnnnnnnnnnnnnnnnnnnnnnnnnnnnnnnnnnnnnnnnnnnnnnnnnnnnnnnnnnnnnnnnnnnnnnnnnnnnnnnnnnnnnnnnnnnnnnnnnnnnnnnnnnnnnnnnnnnnnnnnnnnnnnnnnnnnnnnnnnnnnnnnnnnnnnnnnnnnnnnnnnnnnnnnnnnnnnnnnnnnnnnnnnnnnnnnnnnnnnnnnnnnnnnnnnnnnnnnnnnnnnnnnnnnnnnnnnnnnnnnnnnnnnnnnnnnnnnnnnnnnnnnnnnnnnnnnnnnnnnnnnnnnnnnnnnnnnnnnnnnnnnnnnnnnnnnnnnnnnnnnnnnnnnnnnnnnnnnnnnnnnnnnnnnnnnnnnnnnnnnnnnnnnnnnnnnnnnnnnnnnnnnnnnnnnnnnnnnnnnnnnnnnnnnnnnnnnnnnnnnnnnnnnnnnnnnnnnnnnnnnnnnnnnnnnnnnnnnnnnnnnnnnnnnnnnnnnnnnnnnnnnnnnnnnnnnnnnnnnnnnnnnnnnnnnnnnnnnnnnnnnnnnnnnnnnnnnnnnnnnnnnnnnnnnnnnnnnnnnnnnnnnnnnnnnnnnnnnnnnnnnnnnnnnnnnnnnnnnnnnnnnnnnnnnnnnnnnnnnnnnnnnnnnnnnnnnnnnnnnnnnnnnnnnnnnnnnnnnnnnnnnnnnnnnnnnnnnnnnnnnnnnnnnnnnnnnnnnnnnnnnnnnnnnnnnnnnnnnnnnnnnnnnnnnnnnnnnnnnnnnnnnnnnnnnnnnnnnnnnnnnnnnnnnnnnnnnnnnnnnnnnnnnnnnnnnnnnnnnnnnnnnnnnnnnnnnnnnnnnnnnnnnnnnnnnnnnnnnnnnnnnnnnnnnnnnnnnnnnnnnnnnnnnnnnnnnnnnnnnnnnnnnnnnnnnnnnnnnnnnnnnnnnnnnnnnnnnnnnnnnnnnnnnnnnnnnnnnnnnnnnnnnnnnnnnnnnnnnnnnnnnnnnnnnnnnnnnnnnnnnnnnnnnnnnnnnnnnnnnnnnnnnnnnnnnnnnnnnnnnnnnnnnnnnnnnnnnnnnnnnnnnnnnnnnnnnnnnnnnnnnnnnnnnnnnnnnnnnnnnnnnnnnnnnnnnnnnnnnnnnnnnnnnnnnnnnnnnnnnnnnnnnnnnnnnnnnnnnnnnnnnnnnnnnnnnnnnnnnnnnnnnnnnnnnnnnnnnnnnnnnnnnnnnnnnnnnnnnnnnnnnnnnnnnnnnnnnnnnnnnnnnnnnnnnnnnnnnnnnnnnnnnnnnnnnnnnnnnnnnnnnnnnnnnnnnnnnnnnnnnnnnnnnnnnnnnnnnnnnnnnnnnnnnnnnnnnnnnnnnnnnnnnnnnnnnnnnnnnnnnnnnnnnnnnnnnnnnnnnnnnnnnnnnnnnnnnnnnnnnnnnnnnnnnnnnnnnnnnnnnnnnnnnnnnnnnnnnnnnnnnnnnnnnnnnnnnnnnnnnnnnnnnnnnnnnnnnnnnnnnnnnnnnnnnnnnnnnnnnnnnnnnnnnnnnnnnnnnnnnnnnnnnnnnnnnnnnnnnnnnnnnnnnnnnnnnnnnnnnnnnnnnnnnnnnnnnnnnnnnnnnnnnnnnnnnnnnnnnnnnnnnnnnnnnnnnnnnnnnnnnnnnnnnnnnnnnnnnnnnnnnnnnnnnnnnnnnnnnnnnnnnnnnnnnnnnnnnnnnnnnnnnnnnnnnnnnnnnnnnnnnnnnnnnnnnnnnnnnnnnnnnnnnnnnnnnnnnnnnnnnnnnnnnnnnnnnnnnnnnnnnnnnnnnnnnnnnnnnnnnnnnnnnnnnnnnnnnnnnnnnnnnnnnnnnnnnnnnnnnnnnnnnnnnnnnnnnnnnnnnnnnnnnnnnnnnnnnnnnnnnnnnnnnnnnnnnnnnnnnnnnnnnnnnnnnnnnnnnnnnnnnnnnnnnnnnnnnnnnnnnnnnnnnnnnnnnnnnnnnnnnnnnnnnnnnnnnnnnnnnnnnnnnnnnnnnnnnnnnnnnnnnnnnnnnnnnnnnnnnnnnnnnnnnnnnnnnnnnnnnnnnnnnnnnnnnnnnnnnnnnnnnnnnnnnnnnnnnnnnnnnnnnnnnnnnnnnnnnnnnnnnnnnnnnnnnnnnnnnnnnnnnnnnnnnnnnnnnnnnnnnnnnnnnnnnnnnnnnnnnnnnnnnnnnnnnnnnnnnnnnnnnnnnnnnnnnnnnnnnnnnnnnnnnnnnnnnnnnnnnnnnnnnnnnnnnnnnnnnnnnnnnnnnnnnnnnnnnnnnnnnnnnnnnnnnnnnnnnnnnnnnnnnnnnnnnnnnnnnnnnnnnnnnnnnnnnnnnnnnnnnnnnnnnnnnnnnnnnnnnnnnnnnnnnnnnnnnnnnnnnnnnnnnnnnnnnnnnnnnnnnnnnnnnnnnnnnnnnnnnnnnnnnnnnnnnnnnnnnnnnnnnnnnnnnnnnnnnnnnnnnnnnnnnnnnnnnnnnnnnnnnnnnnnnnnnnnnnnnnnnnnnnnnnnnnnnnnnnnnnnnnnnnnnnnnnnnnnnnnnnnnnnnnnnnnnnnnnnnnnnnnnnnnnnnnnnnnnnnnnnnnnnnnnnnnnnnnnnnnnnnnnnnnnnnnnnnnnnnnnnnnnnnnnnnnnnnnnnnnnnnnnnnnnnnnnnnnnnnnnnnnnnnnnnnnnnnnnnnnnnnnnnnnnnnnnnnnnnnnnnnnnnnnnnnnnnnnnnnnnnnnnnnnnnnnnnnnnnnnnnnnnnnnnnnnnnnnnnnnnnnnnnnnnnnnnnnnnnnnnnnnnnnnnnnnnnnnnnnnnnnnnnnnnnnnnnnnnnnnnnnnnnnnnnnnnnnnnnnnnnnnnnnnnnnnnnnnnnnnnnnnnnnnnnnnnnnnnnnnnnnnnnnnnnnnnnnnnnnnnnnnnnnnnnnnnnnnnnnnnnnnnnnnnnnnnnnnnnnnnnnnnnnnnnnnnnnnnnnnnnnnnnnnnnnnnnnnnnnnnnnnnnnnnnnnnnnnnnnnnnnnnnnnnnnnnnnnnnnnnnnnnnnnnnnnnnnnnnnnnnnnnnnnnnnnnnnnnnnnnnnnnnnnnnnnnnnnnnnnnnnnnnnnnnnnnnnnnnnnnnnnnnnnnnnnnnnnnnnnnnnnnnnnnnnnnnnnnnnnnnnnnnnnnnnnnnnnnnnnnnnnnnnnnnnnnnnnnnnnnnnnnnnnnnnnnnnnnnnnnnnnnnnnnnnnnnnnnnnnnnnnnnnnnnnnnnnnnnnnnnnnnnnnnnnnnnnnnnnnnnnnnnnnnnnnnnnnnnnnnnnnnnnnnnnnnnnnnnnnnnnnnnnnnnnnnnnnnnnnnnnnnnnnnnnnnnnnnnnnnnnnnnnnnnnnnnnnnnnnnnnnnnnnnnnnnnnnnnnnnnnnnnnnnnnnnnnnnnnnnnnnnnnnnnnnnnnnnnnnnnnnnnnnnnnnnnnnnnnnnnnnnnnnnnnnnnnnnnnnnnnnnnnnnnnnnnnnnnnnnnnnnnnnnnnnnnnnnnnnnnnnnnnnnnnnnnnnnnnnnnnnnnnnnnnnnnnnnnnnnnnnnnnnnnnnnnnnnnnnnnnnnnnnnnnnnnnnnnnnnnnnnnnnnnnnnnnnnnnnnnnnnnnnnnnnnnnnnnnnnnnnnnnnnnnnnnnnnnnnnnnnnnnnnnnnnnnnnnnnnnnnnnnnnnnnnnnnnnnnnnnnnnnnnnnnnnnnnnnnnnnnnnnnnnnnnnnnnnnnnnnnnnnnnnnnnnnnnn

SEQ ID NO: 96758 - DNA, 16077 bp, Homo sapiens
  misc_feature (1)...(16077): n = A,T,C or G
gtgtcagacttctggccacccataaaaaaaatctaggccgggcacagtggctcacacctgtaatcccagcactttgggaggccaaggtggtggatcacctgagatcaggagttcaagaccagcctggccaacattgtgaaaccccgtctctactaaaagtacaaatattagatgggtatggtggcacaagcctataatcccagctactcgggaggctgaggtaggagaattgcttgaagctgggaggcgggggttgcagtgagccaagatcgcaccactgcattccagcctaggagacagagcaagactccatctcaaaacaacaacaacaataacaacaacaacaaaattggctcagattttaatcaggaatgaattgaatctataaatcagtttgaaagacaattgacatttcataaaattgagctttctaatctgtggtcttgatgtagcctatcattttctttttttgttttttagatggagtctcgctctgtcactcaggctggagtgcagtggtgcaatctcggctcactgcaacctccgcctcctgggttcaagagattctcctgtctcagcctccagagtagctgggattacaggtacccaccaccacgcccagctaatttttgtatttttagtagagacaggggtttcatcatgttggccaggctggtctcgaactcctgaccccaggtgatctgcccacctcggcctcccaaagtgctgggattacatgtgtgagccaccacgaccagccaggctatcattttcttaagaattcatcaagttaaattctttgataatgttttatagttttctatgtaatggtcctgcacatctttcattaggattcattttgaggattcaaccttcttaatgctattgcaagtaacattaaaatttttaattctatttataattattgagtagttatataatagatatagaactgatcttgtgtctaatgactgctaannnnnnnnnnnnnnnnnnnnaaactccaagctgtgaccaatctggctatttctgtacctcccttccattttctgtatgtcaccttgttttttctgtctatatgtgttatcaagtcatgtggcagccctggagttgctctgagggttctgggggctgcctgatccatgaatcattctgtgctcttttaaacactattcgatttaatttgtataaagtttctcggtaaacattaattttttttttttgagacaaggtctcattctgccacccaggctggagtgcagtggtgcaatctcaactcaccgcaacctctgcctcccgggttcaagcgattctcccgcctcagcctccagagtagctgggattacaggtacccaccaccacgcccagctaatttttgtatttttagtagagacaggggtttcatcatgttggccaggctggtctcgaactcctgaccccaggtgatctgcccacctcggcctcccaaagtgctgggattacatgtgtgagccaccacgaccagccaggctatcattttcttaagaattcatcaagttaaattctttgataatgttttatagttttctatgtaatggtcctgcacatctttcattaggattcattttgaggattcaaccttcttaatgctattgcaagtaacattaaaatttttaattctatttataattattgagtagttatataatagatatagaactgatcttgtgtctaatgactgctaaatttacttttaaactttaagtttattattattattttgagataaagtcttgctctgtcactcaggctggagtgcagtggcatgatcatagctcactgcagcgtcgaactcctgggcttcaagtaatcctcccacctcagttttctgagtagctagtactacaggcatgcgctgccacacatggctattttttacatttttttagaaatgggtcttgctatattgtttaggctggtcttgaactcctggcctcaagtggttctactgccttggcctcccaaagtgctgggattataggcgtgagccaccacactcagcctattttcacttttttttttttttttttttttttggagacggagtctcactctgtcgcccaggctggagtgcggtggcatgatctcgactcactgcaagctccgcctcccgggttcatgccattctcctgcctcagcctcctgaatagctggaaccacaggcgcccgccaccatgcccggctaattttttgtatttttagtagagatgaggtttcactgtgttagccaggatggtctcaatctcctgaccacgtgatccgcccgcctcgtcatcccaaagtgctaggatacctattttcacttcttatagtttatttgtagattcttgtatcttctacatatataatcatgtcatttgtgaatactgacagcttaactttggatgagacacattttacgtaggaagatgtggagaaattagaaccctcatacattgctaatgaaaatgcaaaatagcgtggatgcattggacaacaattgccagttcctcaaagtagtaaagatggagttaacagccgggcgcggtggctcacacctgtaatcttagcactttgggaggccgaggcgggcggatcacgaggtcaggagatcgagaccatcctggctaacacggtgaaaccccgtctctactaaaactacaaaaaattagctgggcgtggtggcgggcacctgtagtcccagctactcgggaggctgaggcaggagaatgacgtgaacctgggaggtggaggttgcagtgagccaagatcacaccactgcactccagcctgggcgacagtgcaagactccatctcaaaaaaaaaaaaaaaaaaagatggacttaacagataacccagccaaggctgcagtgagccttgattgtgccactgcacttcaacttaggcaacagagtgagaccctgtttcaaataaaacacaacaaacaaatgaaaaaaacacacaacccagcaattccacttctcgggatataaccaagagaattgaaagcatatatccacacaaaaacttgtagatgaatgtttatagcagccttattcataataactaaaacaaggaaataatccaaatgtccatcagctggtgaagggataaataaaatgtgatatatccatacaacggacaatagacattaataaaaagaattttttaaaaaaagaatgaaatactgatacatgctaaaacatagatgaatattaaacacattcagctaagtgaaagaagccagtcacaaaagaccacgtattatacaaatccatttatgtgaaatgtccagaatagagaaatccatagggacagaaaatacattactggttacgcagaatcggggttgttgtagtggcaatcaggagtgactgttaatgatacgtgtttctttctggggttatgaaaatgttctcaaattagatgtgatggtcacataactgaatattctaaaaactaaagaattgtacattttaaataggtacattttattttatttattattattattttttgaggcagggtcttattctgccacccaggctggagtgcagtggcacgagcacaactcactacagcctccacctcctgggttcaatccatcctcccacctcagcctcctgagcagctgggactacaggcgtgcatcaccacacccagctaatttttgcattttttgtagagatggggccgcaccatgttgcctaggctggtcttgaactcttgggctcaagcaatccgcctgccttggtctcccaaagtgttgggattacaggcattggccacctcgcccagctaaatgggtaaattttatagtctataatttatatctcaataaagctatttaaagttttggggttttttgttttttgttgttgttgttgttgttttaaacggagttttgctctttttgcccaggctggagtgcaatggcacaatctcggctcactgcaacctctgcctcccaggttcaagagattctcctgcctcagcctcccaagtagctgagattacaggcatgtgccaccacacctggctaattttttattattatttagtagagacagggtttcaccatgttggtcaggatggtctcaagctcctgaccttaggtgatccaccctcctcagcctcccaaagtgctgggattacaggcatgagccaccacgcccggcnnnnnnnnnnnnnnnnnnnnnnnnnnnnnnnnnnnnnnnnnnnnnnnnnnnnnnnnnnnnnnnnnnnnnnnnnnnnnnnnnnnnnnnnnnnnnnnnnnnnnnnnnnnnnnnnnnnnnnnnnnnnnnnnnnnnnnnnnnnnnnnnnnnnnnnnnnnnnnnnnnnnnnnnnnnnnnnnnnnnnnnnnnnnnnnnnnnnnnnnnnnnnnnnnnnnnnnnnnnnnnnnnnnnnnnnnnnnnnnnnnnnnnnnnnnnnnnnnnnnnnnnnnnnnnnnnnnnnnnnnnnnnnnnnnnnnnnnnnnnnnnnnnnnnnnnnnnnnnnnnnnnnnnnnnnnnnnnnnnnnnnnnnnnnnnnnnnnnnnnnnnnnnnnnnnnnnnnnnnnnnnnnnnnnnnnnnnnnnnnnnnnnnnnnnnnnnnnnnnnnnnnnnnnnnnnnnnnnnnnnnnnnnnnnnnnnnnnnnnnnnnnnnnnnnnnnnnnnnnnnnnnnnnnnnnnnnnnnnnnnnnnnnnnnnnnnnnnnnnnnnnnnnnnnnnnnnnnnnnnnnnnnnnnnnnnnnnnnnnnnnnnnnnnnnnnnnnnnnnnnnnnnnnnnnnnnnnnnnnnnnnnnnnnnnnnnnnnnnnnnnnnnnnnnnnnnnnnnnnnnnnnnnnnnnnnnnnnnnnnnnnnnnnnnnnnnnnnnnnnnnnnnnnnnnnnnnnnnnnnnnnnaaaaaaaaaaaaaaaaaaaaaaaaaaaatatatatatatatatatatatatatatacatatatatatatatatatatatatatatatatatacacacacacaaaaattagctgagtatggtggtgggcacctgtagtcccagctactcaggaggctgagacaggagaatcgcttgtacccgggaggtggaggttgcagcaagctgagattgcagcaagctgagattgtgcaactgcactccagcctgggtgatggagcgagattccatctcagaaaaaaaaaaaaaaaaaaagaaaaaaagaaaaaaaaagaaaaagcgcttaatataatgcctggcacacgctctgaaaaatgtttcatatatacggtaatattaccattgggggaactgatgtgaaagggacataggacatcctggcacatcatttgaaacttcatgtaaatctgtaattgtttctaaataaaaagttagaaaatgtattagctatctagtctgggaattatattgtgtcattgtgctaatatttttcccaccaaaggaaggaaccaaggaccagagacacaagcaatttgttacaaacagttacagagaagtgaaatgagaatggaagtaatttcttctgaatcatattaccatagagcagccttagtgtgaaggaagcttagagtcagggcagttaaccactgaacttatctgggtttgaatatgtggtttgctatggtttatttcctggttcaacttgactcatccattcagattcagaataataaacatttaaacatttaaaataataagcatctaaaatgataagcatttcctccacacgtactctgtgccaggcattgtggaagcctctcccatattgctttgaatgggattgcaactaaagctttctaaattctaagagaaaggcacaaaggaaatttactactgccactctaatccatttagtgctcactgtttaaacatctttgttttctcttaatgaaattaaaatgtgtggaacaaattgtgtaggatgtagtacctcatcagtggggaattcttttgcctctactaacctggagcactgggaaaagcacgggagtagggaacatagtggrtaagaaaaagagggtttattttcctttatactcagtttacagtagtgattccagcaggatgcactattttgttcagaaaaagctgatgctaagaaacttggagctgtggctgacgaccytgggacakagctgaagttctgttgcattctcggggcagtgttcagctcctgtaaatgtagaaagaacmgcctgaatcagggtaactctgtatagagctcagttctgtaggtatttttcttctcttttttcttttcttttcttctcttttcttttcttttcctttctttccctccctccttccctccctccctccccttctttctwtctctcttctttcttaagcacagtgtgagaaaatgtctctttagctgatgtgagtaaagagatcaartatctttgaaaaactatgaaagctctaggaaaggctaaggcttcacattcagaatgtcaccttgacagggagctttaaagggagatagaagaagcatagagaggaggacaagtaaaatttcacaaatatacaatttttttttttttttgagacagtctcgctctgtcacccaggctggagtgcagtggcgcgatcttggctcactgcaagctctgcctcctgggttcacgccattctcctgtcgctcagcctcccgagtagctgggactacaggtgcccgccaccatgcctggctaattttttggtatttttagtagagactgggtttcactgttagccaggatagtctcgatcccctgaccttgtgatctgcccgcctcagcctcccaaagtggtgggattacaggcgtgagccactgcgtctgtccttacctttatacaatgtatagaaatgtataggaggctttaggtaagagactggcaattagtttttttaaattgttacttttttttttgagacagactctcactctgtgtcccggactggagtgcagtggcatgatcttggctcactgcaacctctgcctccccggttcaagtgattctcctgcctcagcctccctagtagctgggattacaggcatgtgccaccatgcccagctaattttttgtatttttagtagagacagggtttcgtcatgttagccaggctggtctcgaactcccaacgccaggtgatctgcccacctcagccacccaaagtgctgggattacaggcgtgagccaccacacatggcctaaaaattgttcttcttatttgaaaatgagtttatgagggacattttgtcaatctggcttcaaaaaagatgaatgaaatsaatggtaaaaatttgtttaacgtgctcgtttcagcagcacatacactaaaattagactgatacagagaagattagcatggcccctgygcaaagatgacacgcamatttcattttaaaaaagcaaataaatatttgtttaaaaatcatttttaatcatgtaagtatttctccatttttcagactgtttctcttttcatcatttaaaacaataaataatagggctgtccttatatactttcagtttcaggaatgataattctgaagaaaaaagtgaatggttcaatcaccgatacaaaaattaacaaacatgatagtggcaagcaacatcaggtgggttttgtttattagcratgttttcgccattttttttttatgtttgtttgtggttgaaaagccagacacattaatttccaaggctcattggctgctaagaaaaattgtcactgtggccaggcacagtggctcatgcytataaccccagcacttwgggaggccaaggcgggcagatcacctgagcccaggagtttgagatcagcctgggcaacatggcaaaaccccgtctctacgaaaaaataccaaaattagctgggtgtggtggcgcccacctgtagtcccaactactcagggggctaaggtgggaggactgccagagcctaggaggtggaggttgcagtgagctgagactgcaccactgcactccagcctgggtgacacagcaagagcctgtctcaaaaacaaacaaacaaaaaccctttcmttatcatttggaagaggacttattcttamaaatgcaggccttagtacttacatagttggatgrtgcttttasraaaatgacttgggacactccccctatattttacacatttcagtggcagaacaggataacaattcagacttcctgtgtgtctgaccacggacaacacacagctctgccatccacgagctgcattgtaagtgaagctgggttaaaggtatgtagaataatgattgctattatttgtttaaatattatttcttagaagaaggggacagagtgcagtttgtaaacactggtttaaaaactcctttcttttagaaaggagagaaagtgaaatgtaaawaacacatayttgtgctgaaccatgaatgataccgtcactgaaatatctaaaaaccatattgcttaaaggcacttcttgcaatgtgtaattcagctaagatgataatcaaatgcatagctcttgaatacagaaaaatgatacagatcctcctcctttgctgcccttcccacagaatactgagataaaacttactgaggcctagctaccaaaggcagaattagttgttccatatcctaggctagcatttggtacatagtccctattttatcatgattactgagaactgttaagtctaactcaactgtgtagatcaagacagttttgtcttagtgcatccagcggctgaagcacagttggcacgctgtagattttgtgttgttgcggtgagaccaccagttagaataaagagctgatttgggccgggtttggtggctcacacctgtaatcctggtgctttgggagaccaaggccagaggattgcttgaggccaggagttcaagacccacctgggcaacacagtagaaccacgtccctaaaaaattttaaaaataaattggccaggtggagtggcctgtgcctttagttccagttacttgggaggctgagatgggaggatctcttgaggccaggagttcgaggttacagtgagtcatgattgtgccactgcactccagcctgggctacgtaaggcaagactggctctaaaaaaaatttgctttttaatgaaaaaaaaaaaaagagctgatttggctctttcttcccccatttacccagaattgctaaagtggtagatactgacaaggtatcttagcagggcagaagtctcatggtttgagtcagttgggaccaattgctgttgatgtgaatttctaactcctttgtcattctgagtgtgtcagctgaattcacataagggcattcaccaagggaggaagagaaaggcctttagttttaattattttatagttgagaaaattagacacatactcggggttacggggtctattctgatttttattactcctagaaatttcatacagattataatctgtctatcttgttagtaatatctgactgaattttttggaatagctatgtgtagaacccattttattacacagatttaggaatctcagargatctgattccttagtctcttaaatcttcagtggcattaaatgccaacacattgtccttggtcaagactacaacgtagaaaggaacaagctaattaactacttagaattccctctcctaagagaccacatcgccaaagtggcaccatgacacagcttggtgttttgttggtcactttaggagaacaccattttggaggccttgggtggagctggagatagagccatggaggtagaatcgtgtcggaaaacctgggtttagccccattttgtacttgggcgtttgagctaatcgcttaagtcacgtaaaacaacaagactaataaagtctgggatacagactttaacacctcaagtgctgccaaaagtatttagaagacaaagcgaatcataggcacccttcaccgagcacctcctagacatcaagaaccatgctaggttccctacattcttcatttaatgccaataaccccacgaggcagttatcaccttcattctacaaatgggccccactcctaccaattaactggctgaatcaggatctgaccccgggcctgccaacgctcccgctggtggattgcccgccttgtcagctcgagttggcaggacgtgggagtaaaaacccggcgccccagccttcaccgtgctgcacgaggaagctggctaggcaggcatgactttgtcagtcaaccatcccgcagccgggccctgggctttgttagcagccacttggcgagggccccgggcgggtggggaggcggcgcttcctccaagaggaggtgggaccccggccccgacgacctcggagccgcccccggccccggatcgccgacgacgtacgtgcaggcctggggatggggcgctggctgcgagcggcgcgcccgccgagatggctgcggctggcagggcggtgggcgaggccggtgacccaataaagcggccgggccgcgggaggccccgcccggccgggttccggcactcgccgcagggtcccggccggcggcaggttgcgcgcccccgtccgcagcgctcggcgtgagggcggctcgggaggagggtgtgagcgcgcgtcgccgggccgggacccggcaagcagcgggaaaggcgggaggcgggagcgccggtcgcccgggagccgcgcggaggggcaggcggggcggggcggggcgcggctgggggcccgggcggccgggagccgcgccgcccgcggcaggcccgggccctcggcccgccccgcgcgcgcgcccccgccagcccggccctcctcctccccgccgcccctcccgcgcgcgtccaccggctccccggctcgcgccgctccatgtagccccggctccccgggcggccgcggaggagggggcgaccacaagatggcgggtacgtggccccctgttctccgggcggcggcggctcctcgagcccacccgccctccgccgcagccctgagtggctgccgggccggggccggcgtggggtcccggcgcgggaaggcgcccccggggcgggggggaggcgggcggggggggggcgtcgcgccgggccccggggcgctgaccgggcctttcttctctcccctcggcgcagacctctcgctgcttcaggaggacctgcaggaggacgcagacggatgtgagtggcccggcctcgcggtggcctggcagtccgcggggagcggccggggagggcgggcggcggcgaggcctgggccgggccctggctggctgaggggacggtgggcgagggcggccccaggcgggctggggtggcgatcgggggggaaaatctcgcgtccgtgaggaaacggcgcgcccaggttccgctgggggagggagacgcccggagtaacgcccaagttcgctttccgcccttcgctctcttctcccggcgcccccgaatcgcctgcgggctcagcagtggcgcggctgttttggaaggagaagcggtggggcaggatttgaagtggggtttgggtgtgtttctgcccctggtgtccccttcccccgtcactctaggaaggaagaggctcgcgcgggaggtgtgtttccttagagtcgctcttccaggagcgcccgggggtcagcctgggccccggctagccgtctgggctccccgacccggttttggattgtttgaggatgacatacctgtcattttactttggctggtagcagttttcagatgctcccgatttgattagtggattacgagaaggttagaaggtgtggcctccgcaggaattactaggtttggagagcatatttctttaatgcggatgttcagaaatcacccagccctccttcagtgttaacagtgcagctttcctttgaggtactgaagtttttaaagagttgacgcttttatttttaaaaagacaaagtttctgacatttcctgatggcgacggaattgatatttagaaaggaatttttcgtcttatatgtacttttctaagcctcagaaaataatttgggtcacgatagaaaagacaaaagagttaagcaggtttgtattgaaagaagtgacaaattgcagttaacttaaaatagtttctattcttgctaatcttccaaaatagcgacccatcaaaaaatcaataggttttgagatgcattttaaaaatgcagagtgtgcaaaatatataagcgaagatcatgggatacataagggaccaagaaattgttctgagttgagatgataaccatagtaggattgtggtctgtttagtggaaagcctaccggatgctgagattgactgtctagtacctgtataagtaatttcagagatggctgcagtttgaaattactcttttaaatactctgtagttaatccttagcattgtctaatgtggttcccttactcagagtaaacttaatttttagattcctggttgttttgagtaaagtaagggggatttactatttagatggattatctgaaacgagtaatttatctttaaagtaaatgaaccacatccaaacttttgctaagtctgtgtttttagtgaggtggctcaaaacagctctcttaaagggagcagtactcatgtagtgaagggcagctttaacattttatttaatgtttaccttaagccacttatctgcctaatagtaagtttgagatattatttaaggcatctgttgatttcagatctcttgccaggttaggattggagaaatggccctgattatgttacctcgaggagggctttttatatttatgttcgacttcgtaaatagaagattcatttattcagcaagtatttatgactggagcaaaaacttctcactcctgaaggatgaaatgcagtctcagtttcttccttagcccccaagaagcacagtgtagaggggaaggcatacctgtgaaaaattcaaccatgagtttcaacactctgccaggtactggggatggagctttgagaaagatgggcacaacccatgccctctagtggtttacaagcagttttgaatctaggtgtacagtacagtattacagttaccactggagccaggctgctctgtttgtcttagcagtgtctttttgggcagacttgggcaactcacttaacctccctatgcctcagttttgtcatttgtaagtaggcataagaaatattacctacttcatagagttgttcaaggctgtacatgagttagtgcctctgaagcacttggaacaattcctggtaaacagcgatgattatgattatgtttgctgttatgagaaaagagcaagggaagcttaaaagaagagcagagaaggaaacactgatgttgaaccttacagaatgaaggtacttaaagatgctgccaatgctcgcaactaaattttttttttttttgagatggagtttcactcttgttgcccaggctggagtgcaaaatggcgcgatctcggctcaccgcaacctctgcctcccgggttcaagtgattctcctgcctcagcctcccaagtaactgggattacaggcgtgtgccaccacgcctggctaattttgtacttttagtagagacggggtttctccatgttgatcaggctggtctcgaactcccgacctcaggtgatccacctgccttggcctcccaaagtgctgggattacaggcgtgagccactgcgcccggctgcaactaactttttaaagattctgtttcctgtgcattttaatttaggataaaacagacattgaaggcacaatagttatttgcatattcataatttggttgaaggctttgttagagtaattgcttatttttctcagttactaaagtttttacaggtgatacctttacccagaatattcaggaacaaaggacttttggacatatggccagttgaaggaccacttcccatctcttgtgaagggagaaagaatgagggggaacactgggccatggtgcctccttagagagcaagatggttggtaaaggactgagacagctgtcacatcctggagaagctggagaaggtagaggacccaaaggtagaggaacggagcttgggctgcccttataacacggttgttatctcgtgagcctgagtttctctgtctatggtaaaactccagagtatggagcccaacctccagagtagttgtaaacaagtcctactacttcagccaagctaggtgtaagttggcccttgggatgggaagaaattgttttctggtcaagctctagaatcttggttgaccttcctaaatgcagaacctggactatgagggaagagacagtaagttctgttgtgcagatgatctaggaaaggacctagctggagtctaggacttgaaagaggggcattgccagacattgctaagagtctcaggtctttcgatttgatttgttttaatcccgtctctgtacagaggcacagagtcggggaaaaggttggtcaaagactgacttgactgataacctttggaggaaaaaaaatcctaatgagggaaaaatggatggtatttgtgtgtgtgtgtgtgtgtgtgtgtgtgtacacataatttcattgaaggagtttcattagaacttaaacttttatcaagtaacttataaaggtaagtaaatgaaatcattatcaggtactcttaaatttaggagaataggctgggtgcagtggctcatgcctgtaatcccagcactttgggaggccgaggtgggcggatcacgaggtcaggagatcgagaccatcctggccaacatggtgaaatgtctactgaaatacaaaaaaaaattaactgggcgtggtggcgtgcacctgtagtcgcagctgctcaggaggctgaggcaggggagttgcttgaacccaggaggtagaggttgcagtgagccaagattgtgctactgcactccagcctggcgacagagcaagactccgtctcaaaaaaaaaaagtttaggagaataatgcaataaaaaccatatgtatttaagtttaaaagtgaaactttcagtactgtatcatgaaatactttgaatttcaaattgaaagcaaaccagtgactccatttgaacataggttatctcagcagatttcagagttgggtaaaccctttttaactttttatatttaattatgttccttaaataatgggagacaatacaaaattgtagatgtttagaaaaaattatttcagatttctgttttagtttccaaagatgcaattttgattcacatttaagttggtagattcctaaaatgaaatgagactaagatacggttaagatttgatgagccaatgcttgtaaaaataatttcattgaaggagtttcattagaacttaagcttttatcaaagtaatatgttgaagaatgttatttttaaagaatggctatgtaacgcttagtttacagtgcctttcatacacaggttattcttcacagcagtcctgtgatgtgtaggctatggtattctaatactaataagtaagttgactaatgcccaaagggactaaagaaacaaaactcctaagtttagacggaattttaagctaggccttctgattctaaatatcatattttgaatattttcttaaatggcccagtttaaaatattgatcaacccaaacttgtacaggcaatttctttgaactcgttcttaaagtacccttgaaaattaatctgggatgctgcatgtggtttagtttacacctggagaatgatagagaggatggagcttgggtataagacagcttatttagtcgttaacttttatctcagctgtaactaagtatgacgttgaaaagtttttgaagctatgttattgagtatgccatacaacagacttttttcatatttaagttttggaatccttttacattatgctgtttttcgggtttaagggcggtgttgaagtagagtgaaggatgggtccagaactaactgagggtaaccgcctagaccgcactctgtgcagaatcttcaggccttcctaccatgtttcaaaaccagttctgataagcttagagtccttgcttccggtgggaggtgaggagcaaaatattggggctgtatctggtagtggccagggaatcattcagaaacctttggaaggtgcccttgaacgtgaatcata

SEQ ID NO: 96759 - DNA, 14422 bp, Homo sapiens
tctgttagcatttcgggttatcacttccatctgtttcccatctccgtatatgtacattccttctacaaacttgagatcatgcagaacatagtgttctaaaatcattttggctttgcagttgctcatgagtgttttctcacatgatgaaatattatttaagaacctgattctcctcatctgcttattatatcatcttggagttgtacaggtttttctaacctagttagagaatttgcagtgttgtgtgttatacattgcattgaatgtccatcatacacaataaagatttacttacatctctgattatctcctcagaaaatagaagtttttgcatctattgccaaattccccatcagaaaggcattgctgttttatcctcttaccagcagtaacatgaaggtagcccttttcctgagccctcactagctgtaacaaatttttaaaactttagcaatctgatatataaaatgtatcttatttcagccatttgcatttgttcgactactagtgatgctgaacagtttttctagctcatttacaaatttctcttgtgacttgtctatacaggccatatgttcatttttctactaagcttttcaccttcttctttttgatttataagctctgtctatataccgagatctatcatttgtaggtaaactttgcaaaaaattccactattttttgccttttatcttatttcatggtgttttttttttttttgaggtacagaagttttaaaattttgtgtagtcgaatgtcaatgttttcctttatggtttctttctttgcttttatgctgacacccaaaggtatttctaaaacacagatttgatcagactccgcccttgattaaaatctttctgggtttcttgagtaggaaatccagtctccttgtggtgctctaggtccagaccattgccaccccatgggcatttggggttctggccacactaagcaacttagacttagtactccttacttagcgtgctctgtttagaaaggccatcctctactagcccccatggacccactccccatctccacccacctcttcctgggcattatcaaagacccagctgagacatgaccacctcttctaccctcttcttcccccacttcctcctgtgtagcacctggtccccagaagatctctgtaacggtttgtaaaatgaataacccaaaggacaagcaaagcctaagatggtaaataggagaattggctttcagggccagttttgtatcaaaggattgaactgagtggctgggggctaaggctcaaatgtgagcaattgaaagaccccaggcagcacaggcaggatgctcaggagttggtgggatgcagcgtctgggaggctgagcagcaggcagcaggcacagtaggctgggagcactgggggcccagtggggagcttcagggaagggctcaattctgaaagcacccagcaaccatcacatgaggtcccaaactggtaaactgatcttaaccaccgaaacctcctcccaccccacagtcttccccaaactgggaaatggcatcactgctttccaatttcttggacccgagactgcagtcacttgattcccgttcctcccacaccccatgtcccatctgtcagtgagtcccgttggctctaccatgaaaacatagccagaccacatactgtaggattctattttgatgacattctagaaaaggcacaactgtagggacagaaaacacatctgttgccagtggctgggggaggggagactccaaagggtcatgagggaatttgggagctgatgggaccctcctatgccttgattgcagtggtggtcactcaactgtatgcattgtcaaaactcacagaactggccgggcgcggtggctcacacctgtaatcccagcactttgggaggccaaagtgggcggatcacgaggtcaggagatcgagaccagcctggctaacacggtgaaaccccgtctctactaaaaatacaaaaaattagccaggccgggtggcgggcgcctgtagtcccagctactcgggaggctgaggcaggagaatggcgtgaacccgggaggcggagcttgcagtgaaccgagatcgcgccactgcactccagcaagactctgtcaaaaaaaaaacaaaaaacaaaaaaacaaaaaaacaaaacaaaacaaaaacttaacagaactgtacactaaaaagggtgagtttattatacctcagtaaaaatatgggggaaaatatactaggaatcctgccatttttcagcacactgccatcatcccgggccgggccaggctccatcaccatcttggatttttttttttttctcttgagacggagtctcactctgttgcccaggctggagtacagtggcgccatctcggctcactgcaacctccaccttctgggttcaagtggttctcctgcgtcagcctccccagaagcttggattacaggtgcccaccaccctgcccagctaattttttgtattttagtagagaaagggtttcaccatgttggccaggatggtctcgatctcctgacctcaaatgatctgcccgacttggccttcaaaagtgctgggattgcaggcataagccaccgcgcctggccttggattcttattgcaacgggctcataagtgggctccctgttcctgcccccgcctcactgccatctgttcccaacacagcagtcagaatggtcttttgaaaacaagcagcagattgttaatcctttgctcagaattctccagaggtttctcttctcagaggagactgtacgtgaaactgccgcctgatatgtctctggcctgatctcccgcagtgcctccccctctcccttccccaccagctcgctccatactgccacgatggcctcctcctctcctgggacctgttgcatgggtcccctcagactgaaaggcagagttctcacaatggctgccaaggccctccatggcacagccctctgtgccttctctggcaacctcttcccaaccgcctccctcagctcctccccatctatcagccctcaaggcagccgcggtgccctgcctgcgcttcctgggtgtgcgttccatgctcctttcttggggtgctctgtctggagtgcgctgccctctgatttccattcacctggtccctccccttatctcttccaggttcttcactcaagaagcgttttctcagtggggccttccccgagcaccctgtttgcaatcgcagctgccctgctcccagccccacttgctatcctctcgccctctttttctcacagaccacagatccatctgacataccatattttgtttattgtgtgattcctcctcatatctgtgagggtatgaggtcaggggttttgttttctgccacccctccagtccgtaggtcatgactacttgcctggctagtcagagacactcagttaaattttgtagatggaagaaaaaaaaggaagaaggaaagagtgttaagaaccagtggtagctgggcatggtggctcacgcctgtaatcccagcactttaggaggctgaggtgggtggatcacctgaggtcaggagttcaagaccagcctgaccaacatggtgaaaccccgtttctactaaaaatacaaaattagccgggcatggtggcgggcacctgtaatcccagctacttgggaggctgaggcaggagaattgcttgaacctgggaggctgaggttgcagtgagccaagatcatgccactgcactccagcttgggtgacagagcgagactctgtctcaaaaaaaaaaaaaagagaaaaaaagaaccagtggtgactgtaatcttctgtcactacccctgaatatcactcggttccttactatacatagtcttggacaacacgggatgtggtacgagtgtaggtttgtgggctcaggagttttggggtagtggctctcctgcctgccttacctttttgttttgctgctgcctcagattgcaaagttaacagatgccttctctccaatttatctttagaagcagatgttccaggagaggagcagccggatgctgcaggccttatccccgaagcagagccctgtgagcagcccaacccggagccggtccccttcccgctccccatcgcccaccttctcatggcttccactcaaaacctcacccccttcctcacccaaagcagcctcagcctctatcagcagcatgagcgagggggatgaggatgaaaagtagaggctgctgggaggcaagagccgcaccatgcaggatggggaggagggcgagagtcacagggttgcctgggtggtgtttgaagggtaatagtcacaggagctgcagctcagcagagagaccctgaactctgctaagggaaggtcttgggaccagttctctctcactctccgtacagctgaagagttgggcgaggtgcagagacttctagctggacaacctacacaaaccttagcgtctagagtcactctaaccttgctaaggaaggatgcagagttccctagagagacttgcactgatggggtgacttctgctttggtccttccaccacccccaccaagtaaaccacctgtggcagcggctgttccctcaacctgctacttctgcgtccataagggtcctgcacgttgcctcccaccaccccagctctgccagaataaaattgtttccaatagaggtggcaaagtgcttctgaaatagtcgagaaaaagacagattccaacctcctcagtccagccactgagacctgatgttggaacgcatcagctccttccagttccatgaatgtggctcatagacaaagccttgctttaggctggttataaaaggtcatctagtgtgaaccttaactttttattcaaaggacagttttgtcaagaactccacgtaaggcctgatgtgctcctggttgtactttctcatcactggtttgacttcattgttttgcagaaattaccttaatccgtgggaactgcaacaaagaaaaacttcctaatatataaaaaagaggagctgctttgctttgcctccaggtttagcggacaagaaatgtctcctgaagcttctccttaaaggatgctattatggaatggcttttcccatttctgaccagttaacagtttcatagacctcaagtaacagtttgaggtatcaaacatagtataccaatagggggtgctacctgcacgtatctgttctatatatgctccaatatgtcatccccgggtgtatcccatgtgcaatatgagtatatagtggtggcattttataatagaccccactcctgcgctccaccataatactcctctgaaatccttggtctcaagaaacatctgttctcttgtgacttgggcactttgtcaagcttattccagattcctgtggaaacgttttatcccaaccaggaaattagtattttgttctcgtggcctcctataacatttttgggtgaaggagaactcaagactttttacagagaactgtgggctcagttatgatctcagcatctgaatggtctaggtagtatcaccattatctctggccctaggtttgccaagtaggatgaagactctaagtgttcctgctgagttgtccaaaggtcctgctccttagtcacctgtgcgaaatgagcagggagagttaaggcatagaaccaaactctttgggttattgtatgggtatgccagtaaattcagacacagagctggggtctgactgaatagaggcccaaaccagcaacttgtaggcagagcccagaatctcttgtgatagaaataccccttttcagaggccttgggaaccagccttctaggtgacaaggggacaaccaatgaaggaaggcggcatgtctttccccttcttgttggggttgaactacctccctatccacttggagatgagtgctgtctgctgtgaagcaaaactatgaggctgagctggcttggaacctctttgttcttggcactttccttctccaggactctgggaagcactcatatgggacagagggctggcaggaacatggcatgtgaagaagaaaacttctttttgcagtcaagggccacccagaatattgctcttcwgagagggacaagggcctcattcttccatttggtctctgtcttccatcatgcactcaggtcaagccatgcaagtctgcctaccatttgagttagttggcacttgtagcagtgaaggatgaggccagccaggcaagggaaggtggcgggaacaagggaagagaaaaggaggaaagaagttcctggagggaggaaaggaggataaagaaaatctgctctcataaaaccatttcaggacctcactttayaggtgagactctcttgggaaggcctttgtgcccctrctccatggcccagggcagatagattcacttttacctgaatcttatactctggagcaaatagtgtatcaggctgactatacatttgcaggccttacacgccatactgacaggtgccacttacgtgactcatcagataatgtcaccattgctgccaattatgggaaataactaatgcctattccagggatgagcccaaaccacacataaatgggttctaaatctcaccctcctaacctgcagtgagtccccccgttccaccctcttgaggctgcaaatctactgagaaggaatgggaaggattctacaacccaacttttgatactttttggccatctctcagtctctcccagcccctacccccacaccacctccctgctcccaggcagagaccgggttgcactttgttagggccagcaggtcaactgtaatggccaagagtgagttaaggctggaatgagaaatatgccccaagcttggaggggtaagcaggaataacacaaagcaaggaaagagattctttttgccctagtgaggaaaggaagcttcagaatgagggctggaggatagcaacttaggactgcagaagggggcagcttatgaagatgggagaaagtgggactgaagttgtaggggagcaggagggtagtgattttccgcttttctttctttctttcttttwctttctttctctttctttctctctctctctctytctttttctttctctttctttctctttttctttcctctttttctttctttctttttctttctctttcttccttctttctttcattcttctttgttctttcttctttctttcttttttttttttttgagatggagttttgctcttgttgctcaggctggagtgcaatggcacaatctcggctcactgcagcctccacctcccaggttcaaggggttcttctgcctcagcctcccaagtagctgggattacaggtgcctgccacgacacccagctaatttttgtatgtttagtagagacggggtttcaccatgttggccaggctggtctcaaattcctgacctcaggtgattctcccgcctcggcctcccaaagtgctgggattatgagcacgagccacggcgtccagccgattttccgctccctttcaagtgttaactcaccccctgacaggtgaagagggaagggttccttttacgcacaaccaaggttagcaaatgcccatgcaggatatggggtccctgcctctctggttgcttcatttcagcacttctatattagctgcttatggggaccctaaaatgaactggtcacccctccaccagctaagaaacaagggtgggattgctgtgccataagtcacactgaacgacttgcttctggcaagcatgctcctgtgtgtcaggaccttaccaaggcaaagaaatgccaggctcaagaggagcaggacgtgagacattggcctggcttctaacctggtctgagtggaagagacacagcttagggatttcagttttgctcttaggctactagatactgttatttcaccccctgagggagggacaggaagagcacggatttattttctctccgtcttcagtacttattttagcatctagtcataccccagggagagatgcgagacggtgtcactggctcagctgaagcagatgagcccgtctctagcagagatgtgcctgtttcttaggcatccgttcagcactagtcttggccatcagatttttaaaaaagaaatagctcatgaggcatttgcaacttctcctctctagacttctttctagttttcctctgttgtgtcactgcgatgtgtccmgggacaaagccataagtagagcatacatacttaagactatgctgtacatataagacaagacctgtctgggttaaagcacgaccttatgcccaagcatttactctggtgctgaataacgcgaactrctggaatcagcctcccccaactctgcgcgccccctgcccccctgctcctatcccattcttgctctcaaatggaccacaccattctcaactcgtttataaataaagggatgcagaattgcactttcgtgtgtcattgtcatgtttcttaagtgtgctgctgtgtgttcctatttatgaactagctcaatggggaaaaatacaggcattgcagcagctgtcctggcccaccggctggctctgcccagctgtggccccagcccttcagaaggatgtgactgtgcaccgtgcagagcagggcaaagccttggagttgccaaaggccccacatttgacttgaaagctagttaggaacagcaccacgtggagggaagctcacatggtgaacccagtcaggaccctgcattgtaggctccactactaactgactttgtgaccttggcctaaccttttcacttctttggcctcaaggaaattatttctaaggtctcctttgcctgtaaaggtctctgaatgtatgaggcaggctgcattgccccaagcttctaccagctgtgatgctgtcactgaacgaccatgagaaagtactgaactctcacgggagaggtggtcttccagtcccctggggcctccacagccgcattggtgactggtttcatgccttcagcctccacacttctagcatcaagataaaaggctctagagttccatccacttttcttatcttgtcacttgacggaatgcttcccaagtgtacctaaactttgggaagtggccatttcaaccacttttccatctttggggaaaaaaagcttctttgatcagctagacacagatagatgggggtggacgcactaaatctggatcccaaatgtcaacagctaaggcagatgtcaatattctgagaactgtgctggtgccctccactcgccaaattaaggaaattccattaactccatctggagaggttgcgctttttgaaatgaccacagttctgacattagcctcgggtccagaataaataaagccaggctggtagtcagcaagggaatgaattttaaaatggaatacctattattcgtacaccatactatttggtttcaccacatagatcaaatgcattcttgacaggttgtatttcaagcaacagttacaagtttcttcttgacttccatgatgcctcagacatgttctcaaggggaaaacaatcagttacaaggtgtactaaaacccatatttaagaaccttgatatttgcccccaagagaattagcctttgttaatgaacataattcctgggggaaaaggtacactatcaaaagtgttcccacacatatcacacacacacagtcctcttgtcttggagtcttcattggtaactggagttgaatgtttaggcaacttctccaggtattcagcaggaactattagattaaaaggactcccatagagatgcttttgagacagagtgtgacagttcataagcatcaaagtatacttggtgatcaacttctttaagaaaccatcaagtagaaaccaatcaagagtaaaatctgaagatctcattaagagcccaaatatctgtagctgatagaagccttatgttagtcttcgacacgactataatgtgtattctagaaaaggcaccatattgactaaatatcagctgcagttgaccaaaatgtgagaaacttggagaaatggtcagagcagggttgacatgtactgttcctagaaacaattttcttttattttttgacacagagtctcgctctgtcacccaggctggagtgcagtggtgggatctcggctcactgcaacctccgcctcccaggttcaagcgattctcctgcctcagcctcctgagtagctgggattacaggcacacgccaccatgcctgggctaatttttttttttttttttttgtatctttagtagagatggggttttatcatgttggccaggccagtctcgaacttttgacctcaagtgatctgcctgtctcggcctcccaaagtgctaggatttacaggtgtgagccaccgcacccggcttcacctataaacaatttctattctccttaactttataatctttcttgagtggaggtgaaataattaagctacaagcttcctgtactctattcataaagagttctgatggagggattagctacaagtaaaatatttgatctgtaaccttcgatttaaaaagaattgatgattctctacttgaaagagttggagtactttaccctttccacagggaccttttcaacggactatacttgcaaatatccctgtcactctaaaatgtccaagtccaaagaaaacttgtcatcatctgccatgtgcgtagcaggacatgacccattacatagcttgagaagataaccagtctttttaatctgtttggtagtcatgttccactgggaatatgttgacaaaatgccatttaccagcctgatcacagacccaccttaacaccactgagtcactgattctttttctatttgtttctatatctggtacccagggattaatgatagatgaaagaagtggaagaggtgtgtattcgtttcctactgctctaacaaattacaacaaacacagaggcttaagacaacacaaatttattaaattacagtcctgaaggtcagaagtccaaaatgagtcttactgggctaaaattaaggtgttggcaggtggcagctgttcctgtctggaggctctaggggagaatctattttcttgccctttccagcttctagaggttacctgcatttcttggctcatggccccctaacatcttcaaagccagcagtagccagtccagtctttctcatgtcacatcactctgacactgactcttcttctgcctcctcctcttataagagcccttgtaatcacattgggcctatccagataaccccaggagcatttccctattttcaggtcatcagcaactttaattccttcttcatatgtaatacaacgtattcctaggttctgaggattaggatatggacatttttggggaaccattattttctctaacccaaggtgactgaggacagtggtcacaaatccttgaatcttttcccaagtcctgacagagttgaggagcagtaactctcatacaaatagagataatttcttctttttaccatttctatttaacagctaccagtgatgaccttgctaaaatgtttgagttttgatgtccacaagacaagcatgggccgggcatggtggctcacggctgtaatcccagcactttgagaggctgaggtgggtagatcaggttaggagttcgagaccagcctggccaacatggggaaaccccatctctactaaaaatacaaaaattagtcaggtgtggtggcatgtgcctgtagtcccagctactcgggaggctgaggcaggagagtcgcttgaacctgggaggtggaggttgcagtgagccgagatcgtgccactgtactgcagcctgacagagcgagattctgtctaaaacatatgcacgcacacacacacacacacacacacacacacacacacacacacacacacgaagcatggaatagatataacggggatatctgacccaaaggaacatgctccctggtccatgaggagaggaagtgttgaaacctcaactcatgaacatggagccatggccaatagggaaggaagttaaaggaccccaccccccatttccttgtacatatcctccaatccatacttggctataacaagaagtgaaaatggtaactaaccaaagtctttgaccattggacatgttcccactgaaacaaacccaggggtacagattctggctgtcaggcacaatctgtttcctgcctatttgccctctgtttttttgtttttctttttgtttttgttttctggttctttggatgctgatcacagccagtttaagctaggaatcactttcagccacaacacactttcaagctactccatgctcctttctagagtaactcattttcctttgaaagtcgtggcctttgatccacattttaacttaaggtctggcatacatttccatccgaagtactcaacaaacatttgagtgggccactaggtgctgcggacacaaagactagaggggacacaatccctgcccctttgccctcaatttcagtttactagtctgcctctcagtctcctgactggccctgtctttgactttactgagctcttaaggaaaactccatgtttctggccactgaaacttctgattctaccaatagaatcttacaattattttacttactaattttacatgattttactcatctctttgggggtgatgtgctctaactgtccctgagtacaaagattaccaactctgagagtgagggaaaataggaaaaccagatttttaaaagattttctattcatttgaaactattttctgagtatgctgaaaagaggagactgacaatgatatcccttagctaggcccatgaatggcagtaaggttctgttttgtgagggccttgcatgaaatagtttaaatgatcctaattggacagggctgcttgatggatgagatggtcattctcagtctcccctccattctttgattgcagagtgcctgacgggcctccctcacctgaataatggggcatttatttgcccttataaactgttatttcatgaccagttgaagccctaggagaagagcagttttcatataggaagctccattccaattattgtgctaaggtgacaataattatctctaactttagaaataattccactattatattaagctgtcactaaggaactgttggaagcttctgcatccatcactgttgttgaaatcattaacatgtttattttgtttgaggacttgcaaatactgtttggacaagaatgccagagaatgtaagagtagcattagcctaacttggagtttcttgcagagaaggaaacggcaaaactgcttagttggcccaaatccaaactgacaagccttttctcctttttaagtatttcccaattgctgttaggcagattatcaagaaagtcgcaaagctcgtaggcctgctctgtgccagggagacatgatttggtgcagccagcattctagcttttcccaatgactggtctatagtttgaactttatcggtggttttcaaccctgttgcatgttggaatctcccagggaactcaaaaaaagactcctcagcacccctctaatggatctgaagtggagccagattgagaccctctgggctatggtaatacgtcagttcagggaacaaaataagcccgaaagtaaatggattcaaagaggtagatggtcaatggcctgtgtagcaaagacgagaactggtctgccatgtggccacactaggaaatggtctaagtatcattttatgttttttaaccaaggagagagagagatgattatgttgatgaaagtgtcatcagtgggcagaggacaaaggattcattgacaaaggattcattttaacaccaacgtttaaaaatgacacaattgctgtaaagcacccagcctggtgactggtgaaaacgggtgctcgacgctaattttaaataattcaacagatgaaatggctgtccaatatggttgccactagccacacgtggctatttaaattcagaaaattaaataaaatgtaaaattcagttcctcagctgcactagccacattttaactgttgaggtggctagtggtggccatattggacagcacagatgtagcacgtttccagcactgcagagagtcctagtggtggatggtggtctacagaaacccttcccagacgcaaccccttctacacgatgccttatgatttattcatgtgatcaaagtgtaagtacgttattatgaagcaaatatctgaaaatatcagcagataatcacttgtaagcaagcattattaagtcatttggaaaggattttgaaatcaatgacaaaaaagtaaaaatgtacactcaagtgtgatgctctgtggcagctacatggaactgtgcagtcttgagttaaatagtctctttgtgagcctaaactgcacatactttatggatttcaaaccagggcaggagtggctgctacgaaaa

SEQ ID NO: 96760 - DNA, 14034 bp, Homo sapiens
ctatgcttttcacccctgttccaccagggcttctggacttggctctggtgtccagaacctttgctgcagggacaggcaaagaggccttgagggtctccaccaagcttaagtgccctgcaactctctccctcacagcttggagctggactaagatcccaattcctaccactcccttggctctgaaaagcaccctgacaccccccattgtcactggccttctaggaggtcactgggtgatcccttactccccaggagccaagggcagaggaatggtatgtaggcatctatgttttgttcgttttctttgagatagagtctcactctgttgcctaggctggagtgcagtggcgtgatctcggctcactgcaacctccacctcccggcttcaagccaattttcctgcctcagcctcccgagtagctggaatttcaggcgtgtgccaccacacctggctgagttttatatttttagtagagacggggtttcaccatgttggtcaggctggtctcgaactcctgatctcaggtgatcccctgaccttggcatcccgaagtgcttgggattacaggcatgagccactgtgccgagcctgttttgttcattaaaaaaatcttttttaattcttttttttttttttttttttttgagatggagtctctctttgtcacccaggctggagtgcagtggcgggatcttggctcactgcaagctccacctcccagattcacgccattctcctgcctcagcctcctgagtagctgggactacaggtgcccaccaccatgcctggctaattttttgtatttttttttttcagtagagacgtggtttcaccttgttagccaggatggtcttaatctgacctcgtgatctgcccacctcggcctcccaaagtcctgggattacgggtgtgagccaccacacccggcctttaaattcttttttagacacagggtctcactttgttacccaggttggagtgcggtggcaccatcatagctcactgcagcctcaaactcctggtctcaaccaatcctcttgcctcagcctccccaatagttgggactacaagcatgcgccaccacacccagacatttttttaaaattttataggactgggagtggtggctcatgcctgtaatcccagcattttggaaggctaaggtgggtggatcatgaggtcaggagacagagaccatcctggtcaacatggtgaaacctggtctctactaaaaatacaaaaattagccaggcgtggtggcactcgcctgtagttccagctacttaggaggctgaggcaggagaatcgcttgaacccgggaggcggaggttgcagtgagccaagatcacgccactgcactccagcctaggtgacagagcaaaactctgtctcaaaataaataaataaatgaacaaaataaaataaaataaaataattggtagagacagggtctcactatgttgcccaggctggtcttgaattcctgggctcaagctgtcctccagcctcagcttcccaaagtgctgagattataggcatgagcctaggcgccagccacatctatgttttgaaagagggcagaggccagggcatgggacagagtggggagggggtacagaacacctggggagcagccctagtgcccaggactgggaggagggtggggtagaggtgggcatgtcacttcactgacgtcctttttgtggaagggagtctacaatggccaatggggacatatatcctcctctgtccccctacaatgccccagacttctattaaccacctggcctggcacctattattaaacctcaggggctgggcgtggtggctcacacctataatcctagcactttgggaggctgaggtgggcagatcacgaggtcaggagatggagaccatcctggctaacatggtgaaactccgtctctactgaaaacacacacaaaaaaattagccaggcatgggggtgttgggcgcctgtagtcccagctacttgggaggctgaggcaggagaatggcgtgaacccgggaggcggagcttgcagtgagctgagatcgtgccactgcactccagcctgggcgacagagcaagactctgtctcaaaacaaaaacaaaaacaaaaaccctcagggttgggaggcccaggcaggtggatcgcttgaggtcaggagttcgagatcagcctggccaacatggtgaaacctcatctgtactaaaaatataaacattagccaggcgcggtggcaggaagctgtagtcccagccacttgggagtctgaagcaggagaatcacttgaatcctggaggtagaggttgcggtgagcagagatggcgccattgtactccagcttgggcgacagagcaagactccttcttaaaaataataataataataataataagataaggataataatagtacctctctgatagccttattgtgagcatttaatcagataatatttgcaaattgcatacataacacggtgcctggtgctcaggaaggactcgagaaatgccagctgttactaagggagggctggcaggggataggacatgcttcagctccactcctggttcctgtatgcaccccagagacctctccagtgctctggccctgagctgtgagcttactcctctatgcccaacagtcccgactgccaaaggactctgccctgcagaggcagcctccgcccccaccccatctttgagctggtcctgccccttaccccacagctgccccaccaagcctagatctccagcaaagcaccacgtggggccctggtcctgatcactggagccagccagtcagaattagggccagcctgcccctcagccaggagcctggcaccgcctcccccagcgggctcctgggccaccctgcctaggttgttagtaataaaaataactacttaataagtggagctgcagccaaaccaattagtgccaacctacaggaaggcctggggcaacctgaggtcacctagaacactgggcttgttggaagccagaccactctgctctagaaccaaactcctatccttactggcaggcataagaggaccccacagggagatcagagtgaggtgcctccccttgggcactgaggagagtggaggcctagtgtggtagcagaaggtgctactccaagccaggacacatctgggccagaatggtctcttcagggccaggggatggggcactgagttgggctgggttgaatgagcaacagttaaggtcgaatgtacatgggaaataccagttttggttttgggacttgtgggttttttttctttttttgaggtggagtcttgctttgtcgcccaggctggagtgcagtggtgcgatctcagctcactgcaacctccgcctcccgagttcaagcgattctcctgcctcagcctcccgaatagctgggactacaggcacccaccactacacccagctaatttttgcatttttagtagagacggggtttcaccatgttggccaggctggtctcaaactcctgacctcaggtgatctgcccacctcgacctcccaaagtgctgggattacaggtgtgagccaccatgcctgccaggtttttttatttttatttttttgaaactggatctcactctgttgcctgggctggagtgcagtggtgagatcatgctcactgcagtctcaaactcctgggctcaagcaatcctcatgcctccgcctcctgtgagactacaggtgtacgccaccacacctgggtaattttcaaaatctttttgtagagacagggtctcattacattgccctggctggtctggaattcctgggcttcagcagtcctcccgcctcggcctcccaaagtagaaatatcagtattgttgtggttagccaccatttattgagcacctactgttgctcagccctgtgctagggatttcacatatgttattacggccttttatgaggtgggcaatattacccctatttcacaaatgaggaaagaggtttaaagggctcaagtgactggtacagaaaccaagtctgtttggctccaaagtccaggccctacccccctgccatgacccagaagcttgcagggcactgagcttgcagggcattgagaaagaggaagtgaattgctagctaatgaaggccaaaagggcctggaacccagacctcctgcttcccggagttcccttcatcaagcatcaggcgaacagcccctctcacctgaagggtccaaagcaatggcctcataatctagtgccttacagagtgaggccgacagctattattacccccattgccagataaatcaactatggcccaaggaaggaaaacctctgcctgggaatccagcatctcagtggtcaggaggagaggccaggagccactgaccctaagaggcagggtccagtgagacaggaagggaccaggcaccagggttgctggagccacgaggcgacgtcccctttttcctggctctttccacatgccacagtcaaggacaagaacacttaggggctgagctttattctataaacagggacaattgctctagcaggagaagggatgtggtgtggggtgggacctgacaggaggacacgtggtaagaaggaaggaagagttggaaggctgaaggcttgggagccacttttcctggccaggcaggcatcactgtgaggtgagggcagagccactctacccctagtagtgtgggttgctgggtttgccacaagggctgcctgcggatactggtgagtcctggtaaaggtgactgctgggctccagatgatgcgcccgggagggctgggggtgcaggcttcctaggtaattttcaaaattacttcctggagggcgattcccagcagggtggcccgaggcaggtctggcgcccccactctctcctttggaggctaggaggaccggagtccccgaggtcccactcacctccgaggccatgttgggcggttcctcgtcgtccggaagcttcggtcctccgggtctggaagacaagaccggactgacgacctccttggccagcagggtcccccgggccgggctggctccgagttctgggcactgcgcttgagggagcgcagcccttggggacgcggacgtgagcgcgcgccacggtgctcggcgtcctccacgcccgtcccgcccatccggccgccgcgcactcacctccgcctggccgcacggatagtgtcgcgcccgccactggccagggcttttctggccgggatggcgtcagcagccgccggtcctgtccccacccctggcgacggccgcgccaataggaggccgcccggcggggtgggcgttgcctccatcctccaatcctggccgtgggcggggatacctcccgctgagctggaggctaagcggccccggggcggggaagcgggcggggaaagggttggggggaccccgacggggaaggggcctgggctggggttgaggagggtagtgcgctggcgttcgtgctgtggtcagcagacacgcaggggactggagactcgggccaggggtagaggctatgacatcaggcccgggcctggcaggttcacaagatatataaggtgaaatggcatgttcgctcattcactcattcattcattcattcaacaaacacgtaccaggcacctctatgtgccaggtacagagaaaggcatcaaggaaaaaggaaggaccatcagaaatgaagcctgtgccaggcgcggtggctcacagctgtaatcccagcactttgggaggccgaggtgggaggatcgcttgaggctacgagttggagaccagcctgggcaatacaacaagatcccgtctctacaaaaaaattaataataataaaaaaaaagccgggcgtggtggtgcacgcctgcagtcctagctactcaggaggctgaggcgggaggagcacttgagcccaggagttcgaagctgcagtgagctattgtgccacggcactccagcctgactcctctaaaaaagaaaagaaacgcggccggaggccgggcgcggtggctcacgcctgtaatcccagcactttggaaggccgaggcgggtggatcacgaggtcaggagtttgagaccagcctggccaaggtggtgaaaccccgtctctactaagaatacaaaaattagccgggcacggtggcgggtgcctgcaatcccagcgactccggaggctgaggcaggagaatctcttgaacccgggaggcggagattgcagtgagctgagatggtgccattgcactccagcctgggtgacagagcaagattctgtctcaaaaaaaaaaaaaaaaaaaaaagaaagaaagaaagaaaagaaaagaaaaaagaaacgcagccgggcacagtggcttacgcctttaatcccagcactttgagaggctgaggcgggcggatcacctgaggtcaggaattcgagatgagcctggctgacatggtgaaaccttgtctctattagccgggtgtggtggtgggtgcctgtagtcccagctactccgacagctgaggcaggagaatcacttgaaccagggaggtggaggctgcagtgagctgagacggcaccactgcactgcagcctgggcgacagtgagactcttgtctcraaaaaaaaaaaaaaaaaaagaaagaaagaaagaaaaagaaaaagagaagagaaaacaaagaaagaaacgaaacaaaagaaatgaagcctgacttcaagaagttccaacatagcatggaggaggtgtgcagggagcacaggcsttggggaggggggctatgttgggtactcagggaagaggtccttgatctgattaattaattattcaaccaaaatgtcaggctggattctaggcactggaagtaccctgaaggggcttctaatgaacctgtcttctgcattgggtcttggaagatggggggaatttgcccagggaagaaggggagaacattccaggcagagggagaagtctggacaaaaaatgtgactggcctgctttaagaacaggaaatcatccaagtggctgtaactataacaaaaggtagggaggagaggtggaaggagtttgggagaaggctgtgaagagtcttcaatgtcaagagagggagtttgttcttggtcctataggtcataggaaaccccgatcgattttaaaatcagaggagccaaatttattttattttattttwtttttatttatttttttgagatggagtttcgctcttattgcccaggctagagtgcaatggcayggtcccagctcactgcaacctctgcctcccaggttcaagcgattctcctgcctcagccttccaagtagctggggttacaggcatgcaccaccacgcctggctaattttatatttttagtagagatggggtctctccatgttggccaggctgttcttgaactcctgacctcaggtgatcygcccgcctcagcctcccaaagtgctgggatacaggggtgagccactgcgcccggctgaaaccccatgttaaaaaagaaagaaagraaggaaggaagataaatctagctatagtattgaggatggaatggagggagaagaagagaccagtggctggaatgttttgygatttgaaggtgtttagccctcactcaactcaagagtggaattacttggagttcccagaatgcacctgactgtttcaagccttcctaaatgctcttccctgtgcctgggatgcccttccctcagtgtcggtcttgccacctcccattcgtccatcagtattttttttttttttgagacggagtctcgctctgtcccccaggctggagtgcagtggcacaatctcggctcaatgcaagctccacctcctgggttcacgccattctcctgcctcagcctcctgagtarctgggactacaggcgcccaccaccacgcccagctaattttttgtattttcagtagagatggggtttcatcgtgttagccaggatggtctcaatctcctgacctcgtgatccacccgccttggcctctgaaagtgctgggattacaggcgtgagccaccgcgcctggccttgtccatcagtattctagccaaacatcatcaatgtcaggtagactcccagctgatccaggcatccaactctgggctcccatgtgatcctgagtatacgggcatttagcaatcttttcctgatttgggagcactgtagtagtgccttctgggccttctccaccacccaagtggtgagctccttgcaagcaaagcctcatctgacacatctgtgtgccctgactcccagccctctcctgtcttctcccacagaagccctagaactgggctgcagctgaccactgggaggacaggaaagactgttagatcaactgtatgccgtgtggtcctgaaaaatgccaaagtggagtggcaagtcccgagatccaacagctagtgtctgaggcctggcatcccttcctgggaggcctcgtgtgaaagtcagtggcattctgcagacgtgaggtcgtacttctgaatatccagcaaaatactggggccaaaccctttgacaaatgaactgaggctagaaagagagttggagaagtggtttgacagcagagctgtaaccacaatacctaacatgggtaagtcaccaggtggcaggctctgagctaaaattcatctcattgcatcttcacgacagttctatttatagataaagaaagagaagctggctgggatccgtggctcacacctgtaatctcaacactttgggaggccgaggcaggcagatcacctgaggtcgggagtttgagaccagcctgaccaacatagagaaagcccatctctactaaaagtacaaaattagctgggcatagtggtgcatgcctgtaatcctagctactcgggaggctgaggcaggagatcgcttgaatcgggaggcggaggttgcggtgagccgaaatcgtgccattgcactctagcctgggcagcaagagtgaaactccatctcaaaaaaaaaaaaaaagaaaaagaaaagaaaagaaacagaagctgcaaagggttagggttaggggttagaggacatgtacacaggcacccaggtagaagaggacagtcagtctggctgtccacaagacagaagagagattgtcagtccaggtttgtttgcaacaaacagcaagcttgcaagcttggcatacgtgaaggccatgctgtagggatggggaagagactcaggaagaggagaaagacaggaaggcaagctgggcacggtggctcatgcctgtagccccagctacttgggaggctgaggcaagagaatcgcttgaacccaggaggtggaggttgcagtgagccgagatcgtgccactgcactccagcctggggacagagcgagacttggtctcaaaaaaaaaaaaagacaggaaggcagcataaaggcttgcaaaaaacaaaaaatcaaaaacaaataaacagaaagcagatgagtcaaaagtgtctgcagctgagtccctgacagttgacactgaaatggacgtgagcctttatcttgacaaagcatccttggcattaaagactcataggagggcagggcgaagtggctcacgcctgtaatcccagcactttgggaggctgaggtgaacggatcacctgaggtcaggagattgagaccagcctggccaacatggtgaaactaagtctctactaaaaacacaaaaattagagtgcggcctgtcctgtccttgccatgaggctgcggcaggcaccagagtccagaaaggtgttcattcagcgagactacagcagtggcacaggctgccagttccagaccatgttctccatggagctggagaaccagattgataggcagcagtttgaagaaatagttcaaactctaaataacctttatgcagaagcagagaagcttggtggccaatcatatctcgaaggttgtttggcttgtttaacagcatataccatcttcctatgcttggaaactcattaccagaagcttctgaagaaagtctccaaatgcattcaagagcagaatgagaagatctatgttccacaaggccttctcctgacagactccattgagtaaggactgcgagttattgaaattaccatttatgaaggcagaggcatgagccatggaagataaaccatagaattaaagatcctacttctagctgggcccctcatgtatccattggccgactgcagagtgtctctacctcctctccagagtatcattcctatctgctgccagagccacactgccatttactccaaggactttgtaaaattccacacctggaaagacctttagttgctcagtatccactttgtgtctccaaattgtgtaggactctgtaatcttttgactagtttctgagaaaacacaatgaagcatttcactttttttattgaaggccatttaataaaacacagctggtcagcccagtgcaaaccttattatctgccaccagtacgtaccattggttctcctcattccttgggccagcttctcaggtagctttagacctcaacaagttgtatctttgccagtgttccatcttgttcccctaaattaataaaatgcttttctccaggattttggcaaaggttggtgtggctgtggttttgctaatgcacctcctagatttcaaagatttaccagttttaccatgactcatatattaagatctgtttctactattcagttcctcaaactgaagctcattgaaaaaataatgtataatgttatttgttttattatagcaattattcctcattaaagcagtatttaatgcaatttccagttatttctttggagaatgttatgtccttgttgcattaccttaaaggttgtgaagatgtgatgtgtgttgcttgttcatcacaaaaatcagtaagcacaataaagtggatgccaaaccatcaaacacatagatgttcctgctgggtccctggatatgtaataagcaggtataaaaatattttaattatagttttcttacaaatataacttacgagaaaaaaatttgattggaataatactgtatattactaatttttaactatccctacccaaaccttatgactcacagaattttctcatatacagtattcagtgcacagaaaacttatgactggctcaagtacagtaagttacttctaagtaaaactctcaagtctgagtccatatttgtagctctgcttttggttgtacgtttctaggatcagggccgcttatgccttttcgttcatccttggggtttgagagcactgtatgagggagagagtttaaaaatacattaggagacagaaaccattaaaagtttaactgtcagagatattgtaggtgctaatactggatttcgtctttcagatttaatttcttttatgggtctgttaatcattcaataaatcccataagtatgtgtaatatttcaattgtgtaaaactcgtttgtcactttaaagcctgtaacagtgtgtttgtgttttcaacccattgcaataactttgctgaaatattaacacattaataaaacttttcttaaaaaaaaaataaaataaaaatacaaaaattagccgggcgttgtggtgcatgcctgtaatcccagctactcgagaggctaaggcaggataatcacttgaacccgggaggcagaggttgcagtgagccaagatcacaccactgcattccagcccgggtgattaaaaaaaaaaaaggccgggcacggtggctcctgcctgtaatcccagcactttgggaggctgaggtaggcagatcactaggtcaggagatcaaggccaccctggctaacatggtgaaacccagtctctactaaaaatacaaaaaattagctgggcgccgtggcgggcgcctgtagttccagctactcgggaggctgaggcaggagaatggcatgaacccagaaggcagaagttgcagtgagccgagatcgtgccactgcactccagcctgggcgacagagcgagactctgtctcaaaaaaaaaaaaaaaaaaaaaaggaagacatggaaaaagccaataaaacaacatatgaacaaaatggaaatatcagtaaagagatagaaaacctgcaaaagaaactaagaacaaattttgcagctaaaaagtataataactaaaatgacaaattggcagaataaatgatatagtttggatgtctgtccccccaaacctcatatttaaatgtaatcccgatgttggaggtgggccctggtgggaggtgttttggtcatggggccagatcccttacgaatggcttggtgctctccttgcaatagtgagtgagttctcgtgggatctggttgttgaaaagtgtgtgacacctccctcctctctctcttgctcctgctcttgctgtgtgatgggctggctctccattaccttccaccatgatgtaagtaagcttcctgaggcctcaccagaagcagatgccagcaccatgcttcccacaaagcctgcagaaccatgagcctatgaaacctcttttcttgctgaattacgcagtcttggtagtcctttatagcaacacaaagaatggcctaaaacaaaaaagaatgagcaaatttgaagaaaggacaatggaaattattgagtctgaggaatagaaagaaaaaagattgaggaaaagtgaacagagcctaagagacctgcgggaaaccatcatgtgcaccaacctatgtattgtgaaagttccaaaggagaaggggggtgggtgctgagagaatatttaaagaaataatagctgaaaacttcccaaatttgacaaaagacatgaatataaaaaatccaagaagttcaatgaactccaagtaagatgaaatcagagacccatagtgagacacattataatgaaagttttgaaagccaagaagagaaccttgaaaagagcatgagagaagcaactcgacatgcaaggaatcctcaataagatgaaaatcagcagatttctcatcagaaactatagagatcaaaaaactaatatagtgaagtggggagctgtcaactaagtatctcatatccagcaaaactatccctcaaaaatgagagagtggccaggtgtggtggttcatgcctgtaatcccagcactttgggaggctgaggcgggcaaatcacgaggtcaggagtttgagaccagcctgaccaacatggtgaaatcctgtgtctattaaaaatacaaaaattagccgggcgtggtggcaaagagaattgcttgaacctgggaggtggaggttgcagtgagccgagattgtgccactgcactccagcctgcgtgacagagtgagagtccgtctcaaaaaaaaaaaaatgtgagggagatagtaagacattcaagataaacaaaagctgagggagtttgggctgggcatggtggctcacgcctgtaatcctagcactttggtaggctgaggcgggcatatcacctgaggtcaggagttcgagaccagcctgatcaacatggagaaaccccgtctctactaaaaatacaaaattagccgagcgtggtggcgcatgcttgtaatcccagccactcgggaggctgaggcaggagaattgcttgaacccaggaggcggaggttgtggtgagccaagatcgcgccattgtactccagcctgggcaactgagcgaaaatctgtctctaaaaaaaaaaaaaaaaaaaaagctggccaggcgcaatggctcatgcctgtaatcccagcactttgggaggccaaggcaggcggatcatgaggtcaggagtttgagaccagcctgaccaacatggtgaaatcccgtctctactaaaaacacaaaaattagattggtgtggtggcgggcgcctgtaatcccagctactcaggaggctgaggcaggagaatcgcttgaacccgagagacggaggttgcagtgagcccagatcacgccactgcactccagcctgggcgacagagcaagactgtgtctcaaaaaaaaaaaaaaaaagctgagggagtttgttgtcactagacctgccctggaagaaatgctcaaaggaatcctgcagggtgaaatgaaaac

SEQ ID NO: 96761 - DNA, 12597 bp, Homo sapiens
aggtattcctctcttaggaatatagtatattccttataattattttgcttgtacgaactttgttttcaacatatttgaagtgtcttaaagcactgactctttctctccacgtaaattctaatttatcaggaggtcctttcctaaattaggtaaaatgtagtgacagtttcgaaaatacattcaagtataagaccagtggaccaatgttatctcaggatgaaatcatagatacatacttcaacaaaggtgtacacaggctaaagtgggagagcgtattttagttttcatccatttccaacagtgagaggtgtgaatgcttatgcaatatagaaaaaattcccctttttcagttctaattttttatccttaaaaagtcttttggggcaaattcttgaatcactgatttatattattcttttatttcttctgcctgccttctccttcccactgtctttcaccccctgccctttgaatccttccctgcttcctagaaatagcccttaatgctcttttacctctcctcagctaagtcaaatttttactagtagaagcagggtgaatactgtgaagactatatccaatctgagaaacccctagctaatttgatcttgaaaaaacaaactatccacttcaagctgacctgctgtttggcagccggtacgctatttaccatagcaagcatgaaacatatacattgttatggtatgccaaccccagatatcctctcaggtggtcagtcatctgtattacatggtcttggcaatttcagacctcacattttgctctttatttccatttggacaatactcagttaccttcttaacccatttgacacctggattattaaaaccaaatccatggagaaaaactcaatttctgttgggacagtaacaagtgctttagatatgttacctcatttaatcttaataatgtgcatataatatcctcgttttgtagatgagaaaaatcaagacctagagaatgtctttaaatgaatgaagaaactcaatttttaaaaatatatatatttaaagtatacaacttgatgatttgctgccctcttaacaaatttcaagtattgttatctttagtcaccttgcacatgagatcgcccaagaaccaaagaattgaagtaaagtgcccaaggtcaaatagttaatggcaaagctgggattaaacataagtttataattccaaagtctatgccctttacctgtatcatcaatcaataactgttcatcagtgaaatcaactgtatgtctattctttatacctcagttttggcatatgcattgtacagatccacattaaatgatttgatctatgtttcacttctgtctataaaatgggtataaagagacctacttcgttggattattatcagaatcaaatgagaaaacatacatgtaaagtatgtgcctgacgcaaagtaagtccttgataacctgtagctatcattgttatcagagaaaagaaaaatacagacatataaatcctgtgtttgttctctagaattgatgaaatcaaaagttaagtctataaaaatctgacctgtccatttgttaccatgattattggagacatttgccatttcttcagtggtgcaagttattagttaccatataatatccacaaaaaccaagatgatagacctactttcattattcaaaacatgtaggaaaaattgtatataattttaggcaccacactctaaagggaacattgaaaacttgaagcaggtcaagaagaaaaaaactgaggtatggagaaaacttgaaattatattgtaggaagaatgttggaggaactgcagatgtttacctgggagaagagtgaaaggatgggagggaagaggtgaggaagtagacatggaaattactgtatggatatttgcaaggctgctactatgtaggagacttattttttatgactctgggttggcagaactgcccaaaaacagatttttgccttaatttaaggaaaaacttgtcccttagaactgtctgacaaaaggaatggagaaatgggctgcctctggagtagcgagtgttccagcatggactggattggcacttattggaggtgttgcagtgaaagttcattcattggataagtgttggattaaatgacctccaggttcccctttcaactcagaaagtcagtgacttaaattctgatccctacttaccaataatcactgaatagatttgacagtgatgcattcttttgtgttgcctgttcttccaattgttatttccttagtaacactcctcccgcccctggcaggttgtaacagttatgatagcaatgatttgtagtgactgccaaccctcagggaaccaggatactatagattcatagggttataagggaccttaaaggtcatttagtccagtcttgtagacttgattctctagggatatctggccacttttttagtggggattttttaagacagttagtttataatgttactctaaactgacttgattttttagtaaaattgactggtatcagaaaactggtgtaagaaagctggcatgtgggaagtactcttggaagggaacaagataacagctgtccacttctaaaggccttgtaggtttcgttctctggcatcattaacattagcagagtaatacaatagtaataaccttgctaggcctaattaatttttctctgctttctttatctcatattaatgagttttcataaaaataagagaagattttaattctttttttccctcacattatcaatttgggacactggccattccagtgatggctgtcattgagtcaggaatcttgttttcaagattaaaattttatcatttgtatgtagatcattagaatacaaaatgccctcccccacttttgccatttttgctagaattggtgtcagaatagattcagttaggagcaaagttcagacacacatgttgattcagggatcagagtccaacaggtaaaaggctagaactaccgtaacaaatcaatgctgttttatttttatgttgtgtttaactaaaggacattctgtattgacaggccacatttgtgccatttcttttttagactaataatcattattggagaggagttgtctgctaatgtaactactttgtgagttatagtgttattgtctgataattttgcagtatttttaaatttttagttgactaatacaggtgatttatttgaaacatatctattttgtcatctttaataaaatgtctttattgtttttactgattttgaaggtaattcatgctcattgtttaaaatacaaacaatttgaaaatgtttaaaatagaaagtaaaagtattccaggcccacaggtaatataatcagttaaatttggttggcttttgcaaacttacaatacatacataaaattacatgtatgtatatgatgtgcatatgtttttaacatatctattatactatgcatactttttgtaactttttaaaaatttgatatagaatggacatttttctattgcagtacatacagatatgctaatgtttttaaacagctgtatagtatttatttaaccagtccttaatccctaattggtggggaattaggttttttgttgttgttgttacacagtgtgcatctttgtacatatgtatcagaggtgcttatttatgtatgtaagtaatcaaattcctaaaagcagcattgctggtcaaagggtatgcgttttaaactgatctatattgccagatttttctccagaaaaaggtttacagaattttcactcccagcaatgtgtgagaatgccagtttcttccctgaaacaggcttcttctcattatgtaatcagcattggttttttaaaatgtctgacaattttttttaaaataatttaactagctggtcttacatactagctcagttcttaaggtactaatcctaatgtaaacatgttctctacaaatgtaaatcttaacttgcgtgtcttctgtgtaaccaagaaaaagaagaaactagatcagagacaactatattgcaagagataattgacttacaagagttgatattggaattgctactttaactcagtgtaacttagagaagtttcgatgagacttaaaatccttggcctttttgctgagattctttggtaacccttggcttatttatatatgttttaaaagaatttattgtacctgtgagagtgaattaaatttctagagagtcataaaagttgaagctgagttaaataaaaagttaattgtattggcgaataattcaaaatgtgctttaagtataataggtttttaaaaatcatcttttttaaatgaacaggaaactctgatgaggaagaaagtgcttcagaatctgaactttggaagggtccactaccagagacagatgaaaaatcacagtaagtgctgatattaatagagaatatgtaccttttcaatcagtttaggaagctataaccacagctttattaatggaaaaatacaacatcatggtgatctatttaatgccaaggactgcctagcctggtaagattagagcttattcccagccattgtcataagcagccaacacatccagcttcctcctggtaaataaatctttcatcagttcactttaacagatgaacctctggtccttgcttggatttcttcagagatggctgtttcctaagcttccagagaagcctattccatcatactgtgattatcataaacctatgcaagggaatcccttgcatgggaagtacacttctatactgctatcccactggtcttttaaaaagtaaaataataatatttactgttacaaatacataatatatttactatgctcagtgtagtaaaaaaactacagcctaaggagatttacccaattccccttagttattccccaatataacttaggcttacatttttccttaaaaatagtttcttttttattcacttcttgagcagactataatttaaaatgagaatgaacagagaagttataaagtaagcccacaaagtaaagagaagcaatgacatttcacaagtatttcaaagcaaaattttaggtaatacatttagggagaggtgccaccatatgaaatatttttattttaatcaatctgggtatagttatgattattctagaaactaagaattatttgatggctgaatcatggcgatatattgatatatagcagaatcagccaatatgttgacttaaagtattttatttttattaatctcatataatgtatcatgtagtaatttttttactctattgatcttaagtatgcttttttttttaaatagggaagaagaatttgatgagtattttcaggatttgtttctatgagacgagagagagaagcctccgctccttaatgtgaaacttcatgaagttttaaacttcatgcaatttgaaattccatataagtttttatctgcaagttacagcttgtgtggtttgtctttggaaataaaaatccaggttctctcagaatgtcagaggctttggaagttcattagttcaattaaagactttcctgtcctttaaatatcttttcaattgcttatctacaattctgttttatttgtagctcctagaggatagagctggacagattccattgttcctacattttgtaggttttttttcactgccttcattatgtatcttctcttgccttcattattttattttattatttcttctttttctcttttttagagccaccaatactggatttgtttgtttttcatttttttcttttgtagaaacggagtcctcctgtgttgcccaggctggtattcaaactcctggccttatgcattcctcccaccctggcctcccagagtgctgggattacaggtgtgagccaccatgctctgccaattattttaaattactaggattaaagtatattatgtatgtctttaacttctttctttcccattgataaactggcacccttcttttaagtacctgctctcccattaccacctatttccagctgctttttgaggttttttgcttgcctgtctcttgcttccttcttaacctctaccacttaagagagtttgttataatcaaatttgacttcctagcctgtggataatttactattaagtaaattattaccacagggagccagtgaggtcccagtagtctaaaacagttcatgtgttcacaaaaattgcctccccggcagagattatgcagtaagataatttaactgaataatactatgtgcatgtatcttgcctcagatatactcatgcaaatatgaatatacctctgatatggtttggctctgtgtccccacccaaatctcatcttgaatgtgtactcccataattcccacattttataggagggatccagtgagagataatttgaatcaagggggcggtttcccccatattgttcttgtggtagtgaataagtctcacaagatctgatggttttatcaggggcttctgcttttgcatccttctcattttcttttgctgctgccatgtaagaagtgccttttgcctcccaccatgaytctgaggctttcccagccatgtggaactgtaagtccaattaaacctctttttcttccccagtctctggtatgtctttatcagcagtgtgaaaatggactaatagaacttctatgcagaaatataaaatgtaacttcttaacataaggtcctagtcgcaagggtctatggaggtgcttcaggagatccaagcctttttagaatctgtgcaaacttctgtgtatgttttttggaggaaaagtccataaatttcaaattttcaaaaatcagattttcaaaaggatttattgatttctgaaaactagcaaagatctgcttttataaagagcaaatagatggatagatataggagaagatgcttgacttgatgaataagagaaaggacatatagaaaatgaactgaacataagcaagtattttattgaagatatactattttaaataacatttaaacacggaatgattggcaataaactgcaaaatgagtaatttggtatcattttaaaatggttattatcagagattttccttttattaaacagttattcattaattccacaaatatttatcaggcttctattatatgtgaggcactgagctgggcatggctgtaaaggaaccatctaggaagtaattatgcaatcatttctgaacctgtttcagaaaagtaaatcagtgttgggtttatcagtgtttaacattgtttgatagtcccctcacttcttgaataaattgttttttttcacctcactacttgtagtgtgtaaaaatgaatctgtatttccggtgaaaaagtgtttgaaatgtccagccgcaagactgatattagtagtagaatatatgcagttaaacattcttatggtaaaaatatgtccattgtttagtggttgtcagaaagtaaaattcctgcaaaattaaaattaggaatttaactaggaagaatatctaaagaccctttaaaaatagatcagtgtatttggtatttcaagtagatttatgacatcaggctcatttataaatttatataaaatcacaatacttaatccatgcatacacagtgacagataatgggagttatgtttttaaggagtcttgaaaaggcctctaacatgatgagtttaaaaagtaattctcctacacacctatctcaaactttgctatagtgcggtcagtggtggtcagcagaccactggtctgggggtgttgaagttaggccttcttatacttgctcttatgcagagttcatgtatttggcagaccttcagtggtggacatctctaccctcaatacaatttctggtgactaaggaggggaagttgtttgagctgactgatgttttggggtctaaaattacatagggctaaaggaataacgtttcttacgtggtttttaaaataatagtgcttctggaagtggaatttcaaaattattttaagcaatggaaataagggagcatgcatcacttagctaagttgattactttaataaacaatactcatttgagtgtacatatgacttactgtcataccttatttatatctgtttgttgtaacatttattcacatagtattcattcatattactgagtgcctaccttgtgccaggcactgctctaggtgccgagatagagctgtgaacaaaacagacaaaatagacaaaatctttcctcataaattttacattctaatgtgagagaagcagtctgacaattctaagtacctaacttataaaaataaatggcgattcatttcttggctgctcaaaattgaacattatcttgtctattacaaaatatataggttcattgatgttcaattctttagactgtagatagcttgtgacaaaaaaattctatgataaaatatatggcataactatattattctattttctaattttatctatgattatagataagtaaaagaagaaatcttaaatttctcgaatatccagacagacatataccatgcagtcgaagtagttgattgcccttagtttgtcttaacaatttaatatttagaatgcctggtaggtctattaatcatttttagaaagtcatcttggttgaagtttttctgtactatttttgataaggttcttgcataatccaatcacatgcttcttaacgcataatattcattagctgctttaacttgcattatgattatccagttagaatcttgtgcattgataatctttttaatgaaaagaatagttctgaactgtaaaaaatattcttagttacacccaaaataattgatttcaaactttgaaggaggagtgtaggtcaaaggcatagttttaataaatattgccaaaaaatagtttggtcttcatcattctattatcaagggtaaaagtagagaaaagagataagcatttcagatggaatgacgttgaataaaatgacatcattattttctatatcatatttacaacactatacattctatactgcgtttactcttttattaagatgttgagagattttagttcggggagtggcttgaggtatgaatcacagttacgaatgttatgggtgaattgtgtctcccccacccctcacccatttcatatatttaagccccaatccccagtacctcagaatgtgactgtatttggagataaggccattaacgaggtaattaagactaaaatgaggtcacatgggtaggccctaatccagtcctactggagtccttataagaaaaggagattaggacacagacacacagagggaagaccatgtgaagacacagggagaagatggccatctgcaaaccaagttgagaggcctcccaagaaaccaaccctgccaactccttgatcttgaacttccagcccccaggactttgagaaaatacatttctattggttaagcacccagtctgtggtactttgttatagcagccttagcaaataaatacaattaatgttttaaaaaagaatttgtgactagtttcaggattgcatattttttaatttaaaataaattggcaccaaaaatgtacctatttttgtcatattttgcacttttgttgaactttattttgcccctgggatttttgggctagcaatatatattttcttcatagtcacagggtagtttttctgaagatcctgttacgtgatgatttgttgaagttcttttgaatgttttctggttttcttcaaaggtaaaatgatatttgaagtttagaccagttagataatattacaacattaaacatgttttggactttttgtcatcaccacctcctgaatcttcagcagctagtaaaatcaaggaaagcaatattattaggagttagtggatatacagtgtttttattctaacattcccatgatagtagtgtcaactttgtagactaattagtcattttaacctagcaagtactgtgggtttgaccatgtaaaaacttgaattaatattcagagttggtccattcaaaaaataaaatctgggttaggtgcagtggctcctgcctgtaatcccagcactttgggaggctgaggcgggtggatcccttgagattaggagtgcaagaccagcctggtcaatatggtgaaaccctgtctctactaaaaatataaaaattagctgagtgtggtggcatgtgcctgtaatcccagctactcaggaggctgaggtgggagaatcgcttgaatctgggaggcacaggttgcaatgaactgagatcatgccattgcactccagcctgggcgacagagtgagtgagactccgtctcaaaaaaataaattaaataaataaaaaacagaatctgatcaatggttggccagttaacatcttagtttctcactgagacaatgcagtctggaaatctgagcttgatgcacaaagctccatgcctggtgatagaaaataatgatcttagtccacaaagaattctctatgtagtagcaaaaaaactcagaagtaaatttttgtgcaaataaaatacagatccatatccaatgtcacttaaaggacctgatcatctcttcataataaagttgagataaaggttaaatctaatagtactaagaaataccctcacttttcacttgcttggtaaaaatcacttattgttttgaaatgcaaatcatatcttaccttaaatctctcaaatgacccatgaacatttttagcccaccttcaaggcaatacagtatctggcagctacctgcactaccagcttcatatgtacttcgcactctttactctctagactccagctatatcagcttaaaaatttttcaattgcaccaagcttattcctactccaagcctttgtacatattttcttactcttcctccccaatgcctgctttctgtggttagcgtaagcattcttcaggaaagccttctccatggcccatgtgcacactagtgccttcttcgagatcgttaattgtgcattggttcacaatgtttagttcccccaccaaatggtaaattgttcaagataaaggatcccatctttccccagggcctgcctaacaccgggctttatacagagaagacatctgataaatacataagtgaatggatatcaaggagtcaaaaactcctgcttttattctgaaggacatccttaactttgttaagaaaaatattttctcctatgaattatttaaaatttcactaaatgcaatagagccacctaaaaggaacatgtcagggcctttccacatagagatgatttctttgttaagcaataacaattgcttacaaaaccttcagagtgataaactttcaagacagaaattagcattccactttcaaaatgatgtttgggccatctgatgaactaatagttaatcctaagcattttaagaatccaaaaacaacattaaacttgacaaagtgactttaggaatagaaatttcatgccagaaaaaaaatggcacaggaatctcatgccagaaaaacatctcccaatgagacatttgggagaccggcaatttcagccttactctacatgtagggcttccttaagctgaagatctgtaaaaccacctcattacatggagaagaatattaaactcagcgaggttaagcaagctgcccaaggtctcacagctaatgcataatgttgggacaaaaacttttttctcacctaactctaatcccccagattctgtagtttacatattatccctaagcacccagtgttctgcagaggagccaccttctagcaagatgaagaagcctagctccaacctctacttcaactggaccggtcaattcgatctggagttatacataagatgttgtctgtggcagggccagggggacctgaaaaccactaatcggcctgttaaaatgatcagtctgcaccagtaaagcaggttttctgtttgtggtgactctttatggctttgtcacatgccattaagctcagcctagcttctggctacattacagggagcaaaaacagagcccatctaacctttttcggctcctccttcttgcttttttgcctcctcttcaatgaccttcatctttgcatcatactcatcagctagtgatttccattctactctgttattctgaagaccactcagcataggtgtgatttctttgtgaaaccgtgagaactcctaaaaggaattttaggtcagaaactacataaatcatacagttaattttcaggatctttcatatgcagagagtgagctgtaaggaattgttacagcactcagagctgctaggataagtttaaccacgggcctatgaagtttgggaaagagacacgtgctgtctttactgcctgcctaaggaagtgttcagttcgctcacatctgagttccctccttttattccagccctgaatgagattagggtaaaacctcaaactgctttggagaaacagtgataccccaatggctttccgtatgggtgacttctaaattttggtgacagtttgaaagaaaatttctcatccaaatgtttatgtatttaattcaaataatttgcttacttaccttatatacaaaagtacaaacaaaatcaataaatccaacttgaagtttaggtaattcatctcttttgtttctgt

SEQ ID NO: 96762 - DNA, 13987 bp, Homo sapiens
ccatgttgtagcctcttgaataaggaaaaatctcagccaccaggtctgaccaaaaaggtcaattctaagttgtaatgttcatttcatgtccgcaactcccaagagttatttggagttcccactgggaaccacatgcattctgatcaggcattttattttctgaaccttacaagagccttactatttgatttcccactcctcactcctctcttcccacaaaaagtaactgtcaatcctaacttgacctggcttagaaaaatcaagtgtattagactgaatcatatgcagttgttgattttgacagtttttgatgtacaaaactagcagtttctcatagctcaacctagtagctttcttctgaatgatagggaacctctgccataatgagatgattttttccttcaaggaaaaggaaccacttagccacataagtactgataagaaacatgctcagcataattcctctgtagcatgacctcctgagtgctcaaattgtattataccaggaaatttggcttattgtgaagttcaatggttttgaatttatggcattttaaatcttaattatctgagctgctatcatttaccactgatgctttagtctcacatgtggaggacaagcaatgtttagtgacctcttcactgcatcccatagcacattcaatgtctgggaaatgttctttgtttgacaacttctgtactaaaagtgttgctgcagtagctttgtgcccctgtcagtcttggtagccccttaagatttggaaagtaaatgaactgaaatcttgttttcaatggccatattaaaattctttttttttttcctgtttcttctaaaccacactattttctttagggggaaaaaaaagcataaagtgtaactaatgttaaccacccaaaaacaaatgttttccagattcccttttgcaaatagcctggtctttatttggccacaatttatttacccaggtgctatgtgtttgtggttttcatgtatgtgtaatttaacttttcagaacataaaaagcttttcagaatggtttttaaccccttgctgctgggcatttgggatttcctgcttagtaatgtataaggaaatcctgactgctcacaccactaagaaataaaggtgaaccatgccatttgtccccttccttaccctggctctcagagaggaacccacccagattcagattgctgctggcaacaacaaagtcttatgaaccacacagagtcaagaagtctggtgctgaggcctgggaagacagggcattcctaactcccctggcacttgttgtccttattttcaggatatatatctttaaaactcacattcaaagtaccctgctttgcttcttgattctaaaaagaaaatgacttcacagtgaccccatattttgccatttgagtgaaagcttctgtacctaaaactcaaatgaaagctttattctgtgctcctagagtacataaagcgctaaaagcacttttcttgacaacaatgagttcattatggaaatataaggaatattttaagatttcttcataatacctgcatagtctattttaaaggaatcaaatatcgagtatttcatcttaagtcaaccccttggtctccacacaggcacacacaaaataggaatgtgtgcttatacacaagtagttatatttgttttctcaggaacaagaacttgatctctctgtgcagaaccagcaagcacagactcctttgatgggtggcatgacatgcctgtcaaaggatttttattcctcacgacagtccccctttgaatgtggcctcagctgcagaatggatgtttgccccaataccatctgtgaaggtcaggtgtggtggctaactctgacccattcatgagaagcagacaattgggaactgggatgactgtgtggggatgaaggtgggtcatctggcaatgggatagctgtcatcataggagggacactcctaacctgaggggtgtatggcctcacaggcttagaggagcacctcagatggaatccatacagaatcacagtgataggtttggcccaaggtcagaatgatttgtttagagagggctatgggatagatgcccaaataaatatacttattaggaaatgtgaaattagaaagggtaaatggcttggaggggaagctttagaagtaactttctgacccctctgccctataatcctcatctgggctcattttctccctggtgtcctggagggttagcagtgttggaagtctgactacagttaagcagagtgagactacctaaacaacctaactttaaaaggataacatcactaaagaaagactttacaagtgagtatcaggattttcaaatataatttttatgtttcaggttccctttcttctttttcttaatgactctgggtgatctggaaagacctagaggttgtgtttctgagagtgttctctgccacagagtagtttcctggtattagtgtgacttgcagctcattctgcaccattcactaaatgcctcttatcccttgttgacctacctctgggactaaagtgacatgtgggttttcagtagttttcagtttttgggctatgccctttgtattcagtcaaaccacattttgtcatgagccagtaactcttgggttttggttgtccaactacataatcaccatgactgtaaccatcagattctaaactgatactttcattccagttatatatactttttgagtaccctaatgtagctcaaaccctacagcagcaacctgaattcttaaattagtacttttaaggaattgtgactttcctaaggtcctagattgtctctaggttataataaaacatttctttaatctcaaacagttctttcaatttccagtctcccaatggaagatgtataacttatagaaaaagattgtcttatatttttaagtgcagctcaaatagtactatattaaagttataaaaatgcaaatttattaactccatcagatatttccttttatgagtttcacattaaacccacaaaatcagtgcaggatactgtgggttaaacatttacacagcaagacaatatctgagaaaaaacctttctggcattctatggcatgtggtcacaaagagagcagcttctactctgtaggagaaagagactccatcttcttacttgttgttgggaaaagctgagtgttgggagaagctgaggcagggtttgcatttctgacataatgtaaaaagagtcctggaacatgtccgggggccagggtctaaaacccctcgtggcctttggaacactgaattctgtgctaaagggtggaagactaccctgacgcaccatcatctaagcccagggcataaaacccctcgtagattggaaagaatccagggctcagggcataaaatccctcatggcctctggaatgtgtctagacttgctggctccttgcttctagccctcccaggctcctagatcaattgtgtcttagaattggccatacaaatgttaaaccgtcacagctgtaaatcatgtgcttaatgcaacgctccctttcaaccccacattctcaccatctgtttctttgtttgatcaccaataaacagtctgggcttccagagctcggggcctttgcagcctccatactcgcgttggcccccagacccactttatctctcaaactgtcttttctcattcctttgattctactggacttcatcaccccgatgacctggtgttgggtctgatcaccccaacacttgtgcccttctgtagaggacaacaactaataatctactttaaaaatacattctgtgtacatcatagtcatccagcacaagtagcctacagcagtgaagcagccagcacacaggtactggagttagtcacctggctccacagccctgcaatgccacttcccagctactaatggtgggtgcttcttaacctaaccaaacttcagtttttttcaccagtaaaaaggggatgatatcacttacttcacagggttgttgtgataacaatgctaccttcttgcctgtctggcaaaaaaggatgaattaaaaaattaattatataataatcaattctagggtagtgttcagcaaaaaaacacagactcattagaatcactgagacagagttgaaagggacctcagagtttttcactatataaaagaagaaatgaatagggaaagtgacttgaagttcattgagaaaaatgaatcacacccaaaatgtccaaaatagaaccttatccactgcttcttgtatttagaatcctatcttctaagttactttacagtggtaaaattctgccattttcaaagaagagcagcttcatctatctaatgttagcacaatgaggtacaaaggacatggcaaaactatgcaagggtggatttcagagcttgtccatcaggcaataccaggcccaatcaacagaccacatcagaaaatgcagtagaaaatggatttgagtctttcaaaaagagagacacgcccctgaggccaaacataggcaaaaggaaatgtgatggccggaaagtttcatttctttttcttatagggtagcacaggaaactgtagtagtagctttatcaggatttcactgtggcagcagaaaatgttaagtaaacatgattacttgtttatctgacataaatgctgattaactgaataaaaagcgtatttgtggccaaaatgtaaaaatataagttggacaactgtatgtcaagtgaaagtgtagatgtctgaatcctgaatgttctttcatggatgaaatgtcagaatcatgggtcaggtaggcccttgtaatgtaccaattatctgtcattacttggatgaaaatccagacagtatttgtctcaattttactgatgacctgaagcttgacggcacagaaaatattctgggcaagaatctagatcctaacattttgaaaatatggaactaactccagtaagatacaaattttagtaaagctaaatataagtaatggggctttaaaaaaattagcctccaaggagatgcggccaaaatgtcacatggaaaagacaatctttggtaaatggcatatattcagtatgagttgacagagcaatgcccaccaaaaatgcttttttattagtgactacactagaggaagcattggtactactctggaagatttgttttcaggcctagacacctcactgtaaaaatgtaaaatgggcacatgtgaggaagattaggaaggtgaaagtctagaaatgacaggagcaaaagttgataggagaaggtgttgaggaacatgagacctgactttaaatacctcaagagcagcccttcaacagagcaattggacaattctttatgactaaaggtggcagaagttgtataagggatagaagaggaacacagatttcagtctaataataatttaaaaacctcctaatacttgaagattacagaagttggaaaaggcttcctggaaaggcaatgaatatgcatttgttcacagcaaatgttcaggaagactagttatctgcttgtagcctggggaatgttaggtagcaattatgttcagatgggatgaaatagaaataagatgggatgatttctagggttaattcaatctgaacttacataagccaggtagaaaattgcttttcttaactatataatacaagagctaaaatcttagtgtggctagtgattactgaaatgtatcatgtaagacagagttcaacaggtctgaccttcagtcatttcagagcccagacagctacaaccttcctttcagtgtgggagccacaggcagggatgttataaaatcagtatctgcattaaaatctgcatatatctgcatataaaatcaccattataaaatcagtatctgcacatgcccttcactaccggagagggtactcatgggcacaaagtgtatcctgtttgttttggccgagtatagcatgctgtcaataaaggttaaatagaaccaatatgaaataaacaacaatttctataacaatgggtggttgtggtattgatttatttttccccagyacatcttaaaaatcacacatgggcatttgcttatagaacaatacagtctaagaaaaccagtaagaggagaatctgaacacacactgaaagcacggaatactgactatgtgttgagcccttgtggaaaacagtatggctcagtcggaattgacaaagctatgctggaatctctcaggaattttccttcccactgcatatccccttttagactataaatgtaaagagaagaattgtttgtatgcattagttacagcagtataatggcttacatacaagtgcttactcacatgtagttcccaaaggattactacagtcctggcaggaatatgtactgccttggaggaagactcaggataagatattattcaagttaagttgtatcagagccaaagtatttcacaggcttagcaaaaatggacaagaattaatataacctacatatatttctcataagatttaatcattgtccagaacagaaatattcgttattctgaaggcaccatcacacgaaaaaggactgacacacaatattaggaatagaaaccacccgcactccccagctccacaggttctgctcctcagggagcctgtgagcaaacatccagaaagaatgtagtgagtgtcttgaggctcartgccaaacccaccaagccacaacttagggctactaggttggggcagtaggaatgaaaatgtaggaaggaaaagcacatacaaatcccattgactgattcgatgtgtatcagagtacaggtccaccatacaattagttaaatatactagaacagattatccaaaacaacactgtggaaagaattaccagtgtttccacatataactgcttaattcctgacatgttcttgaagaggaatagtcttgaactgctgaatgacctctgtctaaagacttaccctctcccactcatttaaaataatggctagttcatggaaaaaaaaaatcccaacaaggcactgtgagcttttggggatatagtataagtagctcaaaaaataactacttatagaaacttgtatgccagtatgagcatttcatgtccttttctgatatgtgaacaagattaaaggaaaaacaygtttcctagggtgcatatggtgttcaggaaaaacactgccaacaaaaggttgtcttaaaaacatgtatatatgttgcttagaaatccaccatgaaacagatttttttccttttctttctcactcagatttggaattcagagtctctgcaagatgtttttccttgtggaaaaataaataatctcctttggaaaccaaaaaagaaatcttttcatgttcacagaactaaagttactaaattctgtgatggttctttggcttgagkgttctatatgtcagtggtccttactctgatttgttaaggaattaattatgattagaagagcacaagagtgctcactctttgaggatcttccaaggttcaaaagggagtgcttcaggttcataggagtctcaaagcctcctgggaatacagcattgattttaaaaaatgattagggattgacaaaacctagctaacaatatcctcagctataaatccaaagagatttagtcacaagtaggttgcacttgattttgcacttgattatgctacaagcaacaaaattataaaaataaattttgtgttttcaaatcagtggaaatatgaacatgaaaaactaaaactaaaagaaaaactcatatgcaaataaaagaataaacagcttcacactccctttgaagaaaaaaaaatattagacccaggtccattttattaataatatgatctataatctcttgacattacaagtagtttttacagttaaatttcacactgaagacaaacactgtttggcttagggagcagaaagctgagtaacttacatcctttatatcagacactatattttaacagtttaagaaaaccttttacactttctggatttaagcatcaatatgtaagttgtttcctttacaggaaactgaaattagtaagaattaagtgaatatactgacagatggctcatttgggaacatgaaacctagagcaaagccaagcttctataactcataaagtcaaaggtaaaacattctggattcttcaaacctaaatgggcacttgttattttccacttttcttcaaccatgagctaagccctaactaaaatcaaagttgataaagattaagtggtaaacaaaaaaattattaaagctgtccttaactcctgtctgagtgttttttaagatatagatatgctttccacagcattccattttggctgcctcaagcaccagcacatgcagtttgtgaatcaatctgtagtaactgtgttctagcatttatacagaatggaagttcaaccaaacccagccccatatgaacagccaagggaacacacttcagtgtaggactacagagcttctctgataagctacagttaagttgtagctataaaggaatatgacaaaggaaagtctgggtgctaacatgcagaaaggcattttcaaaaatgcaagctaggacttagcagttactaatagactattctagtgggggaaaaggtttccttgcaaccatctgtatctggtataccatacacaccgatggaagctcatcctttattgcaattttgttttcaaaatacatcaacacaggcaaactagaaggctcccaacttcataaataacttttaagtaatagtactacaatatgtaagcacttttaggaagaaaactcctacttccttagaagaaataatataatcctcttttctttgtgtaaaatgatgggcacaataaacatgtggtttccacaattcttactaagctaaaaacagctcaaagttacttatcataagactaaattcacttatgcactactagaaattgcaccaaacattaaggcaacagtttctctaagggtctataaagcctgttcatattgagtctttagtattcaatgccatttctcactagcggcaagttactattcccactgaaaccccaacccaaatgtgacattaccaaatttaagtaaattattgcaactatgactaatttaagaaagtcagtgttatgcagtactgaaaaccaaataggcaacaagtttttgaaattaaaaataaacattaaaaatgagttaagaagtgtcatgtaaacagtgttctcctgacttaacttttatgaagccattttcagatattatagaaataagaggcatggtttaagtgcttctgtgcatattcatgaactcagtccttcacagataccaagtctatactgaggcacctcccagaaggtatgtgaaagtgggggctgggggtagggggaggctttctgatttactaaatcagagtgaaacagtactgatcaatattcttgtgtttcaaaatgatttcggtagaaatgattccacctacaaaatgcagtcaccattataaaatcaaggttggggagtcctgcatatacttggaaaaagaaaaacaaagacataaatcatgaatttccataaggttcatgtagaatagtgaacataataatttcaggtgttacatttacagtttcctaatatcaagtatggatttctgaggttgctgaaattgaactccctgggaaagaatgttataacaatcacatgcaaaggaatggatcttcttattaacctgttttattttttaaaaattactcagaaacatatacatatatatatatatatacacacacacacacgcatacatatatatatatatatatatatacttccagtgagacattagtaccttctttaattttatattttgatcaccaattaaagaaattaccttcgtgaacagatgcattttataaagctgagatttttataattctagaggcaacttcctcatcaagtgtccaactaggtcaaatatcaagggcttaaagcaaagatctgttggaaattttataattaaaaataaatgaccaatgaagagaggcagcttctaaaaaataaatatttcattttgttgttaaactgatatttaattctaatttaattacagatttattagtttgaggccaattttaatagttaaaaattatttatcattttgaagtcttaaaaatatcattttgtcaattttaaattaccatttttctggttaaggctacttcagatataaaaggtatcaaactgcccaaaaatactttggagctgttgctacatacacagacaatgcatccttttaaaggatcgtctgcattttgacttacattatctgatcaaatattagttttaaaaaattatcaaaagttaggtattgcattaagaaaagaatccatctcaaaatgtgaatcatgaaccttggcagacagtgattcaaagtaatcatttcactttaatatccaggtttgaatgtacaaatgcttgctaaatgtgattaatgttctcattatttaagaaacaggatatttcaaacttttgattatggtatatgcattaatacattacatttaaaaaaaattaggttaaaccagttattcaaaaaaggcattaaaccattattaaaaactaaattgaaactttactttttatatgaaaatttatcatgccattgggattaattttaaaaaatcaaaaatgatttttgtcattgaaactgctgaggctttcaaattcagtagttgaatgatgactgtttctttagtgaaacaattcttgcaattggagacattaagtctaagagttttccttctgctcttgctgtagctgtttcttctgcatttcagcaacaagaatgtgaaatcagaaacattaggactctaagttgaataaaggcattcatttcatggtaaacctgttcttcacttgcaatgaaggatgtcagcttttcttacaaaacatattatcaatgaattagaatataacaataggttatctcagtgatacaaatacaactcataccacaatagaaacagaaacatggagaacaaaaacatgtcccctaacagaataatttgtatattgatgatacaaggttttatgcatgtatactaatttaaaaaaaaaagtaggccaagcaccttacagacgtgaaggctttctaaataacaggttgcctaaattctttcatgaatatccttccccttaatggcctactcacactagactatgctcttaaacaatgtacacgtgtatcactcctcagtggaatccttccctagacatctgattcccagaaacgttcttttaaaaagaggctagctgagcaatcaatgataccaaatctgtctttgttccccaagaggaagcaacaatacaaaacagctggcagcagcttcctctggaataattgacagctttgtgctgcctgactaaaatttgaaatgacaaccgctgaatgtaaaatgatgtacctacaatgagagagatttaggaatactatctgtcaatccatagatgtagaaacaaaacaaactacagaatgaaaacaaacttattttaaaccaaagaaacaaatgtatccaaaatatagtccatgatatatttgattactagtataaccacagttgaaaacttaaaaaaaaaattgacatttttttgtaatggtactaatggatttataaaaggtttctgtttccaaagatgttattggggtccacatattccttgacagacttcagcatcccaaagccgacatcagagatactttcctttagccattgcttccgtaacttgcccactggaaaaacaaaatcaaaaatgcttcaatatatgctatgatactgggaaccaatcaatcttgtgaccatgagtgaacaaacactgtgtgataaatgcttttattcaaaaatgagaaatgttttgctttatttgatttattgagcccaccagactatcaagctcattaagcccaatgtattcccaggggaagtctgtgctccacagtgtctcctttctctgtaaactatgaaatggagattgaaggaagcttggacagagattatagcccattttacaaataacaaaatgagaaaaacgtgcatttcgaaagaacccacctctgccttaactaccaaaacacacccaagttttagagaaaatgaagttaactaaagaaaaacatcacattgagatgaatttgttgggtaaattcagcaaaaatgacaggatatatatccttaaaatattttaacgaacataaaggcttcaaataataagaaaatttgaaactttaataggctcaagaaaaaattctggctattaagcttctatttacattttcttttcacagtacttttaaataaatttgcatgttcccaaataatggttactttcttcctactgtttttccagatttagaatttttttcctaaggcattaaataaatcaaatacctaatccatcgtaaacttaatcttttgcttttacatactgtacaaagttccctttttttgtttctaggtcttgctaatttgttctgagaatagtgaagtaacataatggttagcagcataaattatatttcaaaaggtactcaatgaaaaacataaccttttgtaagtagaacttttgtaagaaagaatatgtacttaatctgtaaaagaattctgaaatgtcagtttgctctggtattaaaaagcaagcaatatgctaacttatctgtggcaaaatggataaatcttttaatttacagttaggattatttgtacttgtacttctccaaaaaacctattatcatactaattgaattcaaacggtcattttctacaaatgttcattaatgatccaaagtcatcaacagtgatttaattgaccaactgaaatgggaaaccttctttcattaaagtattcagcctgtcattctataatgcattcccatttattaggctatagtgatacatcatagcatctgccttttggaaaccttaaataccatttcgagctcaactaaaaccatcttttgtgtccagttctctaagaaaccatcaaattgtcatcaaaataataaatactgtgataatctcagaaagcaaattatctgcttggctttcagaaataaaaaggtattgctggtattaagacggggggaaatgaagttcagcagaaaaaaaaccttaaattcaaaatgaaaaattttgtttgagatagctctaaaaccagaagctaagagtaaataaatccctattcctgcaatctctaccacctaaaagatattctaccaggaccttctattatctcctaagggactgcccgtgactatgattcagcctgttttttcacttgcaaatggattagactttataaggtctcttcaactctaatattctatgattttaagcactttttaaaaaagttaaaaatcagttttttccagatttgctccacaggatttttttttttttaaacaactactctgtgaatggtaaaaggggctttaccatactactataagctgcccacactgaggcagctgaagagagagaggggtgacgagcagtgaataccagtctccactgttatctgtaatacagtttcactgaatgtatcctgtggttatggatgtaattgtcctgaaaagactgcaaacaactgctccaacaagatggagcacattagaacctcagcaggatgcccaacagctagcttgtctgcctggttttacacctctagtaataatgcaattccacaaggaactgaaccatcgtctgagaagccacccaacagccattgcatatttaatgaagtcactcaccaagcgctggaaaacagaaggtgcttggagtgcatcattacttctgtcagaaggataatttacacatctatcttgtcaaattttctatggtttatacttttacaataatcaatctaatatacatttgattagtgaagtagaaagtagaaaaaaaaaaagggcagtacggccaacaaagctgtggcccctcataaacacatttgataaaagcatt

SEQ ID NO: 96763 - DNA, 964764 bp, Homo sapiens
  misc_feature (1)...(964764): n = A,T,C or G
atctagactgcataaatatatacaaattattcctcttcatcttctatacttggatgattaaaaataattgaatctcactactaagtgaaccagacataaggaaaccacacttcaattcatgaaagcatatgcattcatttctaaagttaaaattttggtcgaataatgtatagatttgtcaaaataaaaatgacttccattttatataacgtcataagcctagaatttcacaattataagagaagctttatataaatgacaaaaactaggaaatgcatttttcacattttaattacaattcacatgtctgtatctcctgctgtgatgttttgccaaaaagagatctcatttgtgaaactgccagtatagaaagtgacagatggtaagaccagtttccaacctgctatagtactggtttaatatggtttagattattttattagcattgtttacttttattatatatctaagtagtaccagaatactattacagtttgtttcatttcttctatggttataactgtatctatttatatgatttatatacctgatttagttttagtttcagattttatcaatacactatttttaggtacggtttaactgatgttttattttaaaaataggacaaaatgtcctattcattttgataaaatgtctacaacccacatagatacctagggacaatcataatagaaaaactcaaaagcccaattaaaagaaaatcactttgattatataacccatagccatcaagaaattaatcaattaattgggttaactttttaaaaatattacaatcagaaaaaatagtacaacagttcacccttatccacagttttactttctgctgtttcagctacctgaggaacgttgcagtccaaaaatactaaacagaaaattccaaaaataaacaattcataagttttaaattgtgtgccattttgagtaatgtgataaaatctcagtccttcccactccatacgccgggacgtgagtcatccctttgtccagcatagccagctgtacatactacctgcttgttagtcatttagtagccctcttggttatcagagcgcacacgcacacacacacacacacacaaatatatatgtgtgtgtgtatgtatgtgtatatataaatgtttttattccgtgtgtgtgtgtatgtgtgtgatattatctatggtttcagacattcactgggagtctttgaacatatcccccaaggataaaagagaactactgtattcaaacataaaaaagtattccatgtgaaagcatgaaatcctaaagttattttcccaaagacctcattagttatatttggaaatagaaaagtggctcatgcctttaatcccagcactttgggaggctgagtgtggaggatcccttgagcccaggagttcgagaccagcctgggcaacatggtgagactctgtttccaaaaaaacaattaattaattaaaaaaataaagagaaacaaagatgtgaaaatgatataaaagtttctaatggtgaatctgtttacaaaattttttgttttatgttaataaacattattttaactcagttttcctcccttaataaacagagaggcttaaattcagagaacattaatgttagctcttgcctcctttcactacatttcaccacttaaatgtgaaaaatgcatttcctagtttttgtcatttatataaagctactcttatattgtgaaattctgggctcatggcgttatgtaaaatggaaatcatttttattttgacaaatctatacactattcgaaattttttcagctccctaaactgggtagtcttcctggaaattcaagattacttcagttgctgggtaagagatgcctctccatgtcctctattatccatcctcttagcccacaaaatgggcttagaattacatcatttggtaaatccgggacatgatagccaagatacaaggatagtggcttacattcacctttatagtcttgctcccaagtatgtcctacagcatgaatcctaggtgtcttgtggagtttccagaccaaagacagctcatgcagtgagtgctttgacccagtcacctgagtttagcttctgcctagatttccacatgaatagatcttgctgtcctgccactgggcagaatttccacagcaaaaagacaatttaccaagtatagtcaccactatcagatatctgaagaataattttatttaaagtcttgtctactgtgccttgtctacctggaaacttgcccagctaagagttttctacattaagattgagtttttctgtgctctctggacctagaactgcagctgagtccatctgcacatctcctatctcacactttctcatcagtccttgtcttgaactaagtgccagttttagccttgatgtcaattaactagtcctgtcgctctaaggtactaatgatgccactttcatattacaaaagtcatcacagaaggataatttacttcttagtaatatgaaagaaatccagaatgctaataacatatgcgtaatattttcttgaatttttgtattccattaggctaaaacaactaggggaaatggtcttcatatattttttcataatgattggctaatcacgatagagtataaagtaaatcaaagaaacataaaatagcttggaaagaacaaaagaaatgcaatttaaaaatgtttaatgacactccacctacaaacattgttttacaaatgtattaaagttaattctctttctaaaatgtcttagactagtaatagggttggggaaaaaaatctccctttccttccctgggctataattttactttttaggtatgactactgaggaatttctaatttggctcatcacttcagtgggaattcagtgcacataaggggcacatatgtaattggcaacctaatttttctgctttcatcaaatggtgcaatgccaaatcttcattgaacttgccagttaaatgcacttgggaaccaaacagcagcaagcatacatgagattaaaatgaacaaattggaaagagtcattaactttttctgttttcctatcacaacaaaaattgtatcattgaaagtgttgcaaagtggggaattctacttgaaacattaaacaatcttaaaagagaataattcatttacttaacttctaaaatgtggttcattataatttataaatggggtttctagtgcagatttttttcaacaaaaatacaaaatcattaaaatgaataaacttttcaggagtatgttttaagttatatgtttcacatgtctttctggtctagtgcatataaattctagcctttatttggaaagaaaaattgtcagaaaattaagcaagaaatgttggcttcctgtaataccgtaatgaataaaggcaattgacagcttttcatggttctcagtaattatgaatggaactgagagtgtaaaaattactatcatttgtggttaccaaaaatgcccttgaaatatctggtctaatatataattttgaagtatgcaatatacagtcataatcaaattattgttattaatgacaattaaatagagaaccaggacactgaaaacaccacaaacttgctgaatatgattgagtatcatccctttaggaggacataaccttttaaaatgtctgtttacggctctcaaaccacctatgtattcactagatgcaaatgttcagtaatatctcctctacaaaatttcgttttacaatgacaccaggtttctttcagaaaggactgtgtaggaaagttttctttttccatttatgagttcaagtatgttaagactttttaaattgttgaccagccctaaaaaacattaacatttcataaatcgctcttgcattgtaaaaagaaggagggaggtagaagaaaaatgccaaaggattgtaggtcagcttatttcataaacaaaagctctaaggaaagtcctgagatttttaagtaagccaggccttctgaatgggacatgatatggacagtagaataagacagattgagttccattgacattatttattctttgtatgatcttaggttatctacacacactttcaaaatttaactttcttggtctgtaaaattgaggaaataataatagctgtcccatagggcacactatcaatcccaatatgctttgttagtccattcatttttccagtgcttaatcaaagaagctttaatggcctatatacttatattattgatatattcacgcacctgtcccaacttgctgtcctttccaatatcactttgtttttatcacactccttaatatcacttctttgttaggtcttgatcacatgcttaaatcatttttaatgtttgctaaactctgtatgagagattgaagaattacgagacaggaacatcaatgtgaaagggtaaaatatgtggagaatatataaggtgccagcatatgacaaaaccctaaagatgtacgatggtcacaagccatggaagaagataggacaactgaattgtcaaccttgccgcctcctccgtagcctcctaaatcttatcttccttttgtctaatttatgaaaaatgtttcctataattgtctcccaaaagcagagttgtccccatgctgtaatatacattgaccactcagattcatttaaaaaatacatcttgcttttattcccaatataaccacatttcagaagttagatcatagccagttagattacacagagcgtgcgcacgcgcacgcgcacacacaaacacaccttgaaaaaactgtagatcacttgatttctggaagtttttctcaatacctcagtgcacctgatcacaacatcttgtaatctgggcagaaggtaagggaggtgatgttaggcgtacaaacttaatattggggatgcattttctacctagaaatggtcctacattctaccagaatgggttaaaaacagatgcgcgcgcgcacacacacacacacacacacacagaattaaatgcactacatttgctgtattgcctgctaaaggcataaatatactggagtggagataaagaaggggatggatgggaaagagttcagtacttagtgtaaacctgaaaggaaatgaggcagtgcaaggggagagaggatcaggggaaaataaattatgtaggcaacagaaccatgcatcaaaagtcttttcgatttctaaactggcaaattttctccaggggaccatcagtcaaatgatgtcaaattgagctgattctcttgtaatgcctgtattgtgtagggccttccttgtaggaacacaagttccactctcggacacagtcgcagtgcttgcattatcttacagaattgattgctgcaaatggttcctgggaggtgtgacctgcttaaaggaaagaagctaggtttcttttcttgttactgaggaatgaagacacttgtcaggatgtgaattgtgtgggtgagaaggaaaagcggcgaaagaatctggtaattccttcccttacaggaggaagagaaaaaagataacatcggaaccttggagaggagaaatacagtgcatttatttccagcatccccgcagtcacttcacgtctcttcagacttcccctattctttagtcttgacctgcctatgcacttgaactccacataagcactaggatggactgggggaaaaggccaggtcagcacggtgggatactgcttcccctaaaatgaaaactcagcagcgggccagcagtgggtgtgcgcgcgtcgatgccagaggatgcgtgcgtggaatccggcggacgcagtgggccgggcaccgccctccaagccgccccgcccagcccaccacactcctccttgtataaaggccgcgcttgggcccgccctcctcacagccccggagcgcggcctgccggggaggtggatctcgcgctccccacacagtcacactccgcgcactcacacacttggaagcgcctccccacgtccctcccctgccctcctcttgctctgctcttctctccctcaccacaaatagtcgccgacctactgccaatccgcctctcctctctctctctctctgtctcaacatgactgactgggaagcggtggctcgggcagagcagctccgctggcgcaggcaggaggagcaggaggattattaaataacgcagctggactctgtgcaactgggagtggagaggagcccaacagccgagaaggggagggagggcagaggagggggaccaggaaggacacccccgtgccccgaagacataaatccctgagtgcccgggaggagccttaacaagcgcacggagccctcaaggtagtaacgcccctggtgcctcagcgctcagcgggtcgcgcgtcgcgtcgccgctttgcggggccggccgcaggcggacgcggggatgaccgctcggcaggtgaccgcgccgtgtcggggccgcctgcgagcagcgcgcgcccaggcccggcgtgctcggcgcagagacctggccttgcgggcggggtgggaaggaggcgggcgggctcgctcaccaccggcccgcgactcccagtgcgccgcgtggccatttcctccacgctgctgcgtggtttgctgcctgcggccgcggcggccgctccagggcgatgcggagcgctggccaaggcggcgagagttggcgcaggcttcgggtcgctccccttcctcgccactcgcgtcccgcaggtagaggcgaccggtcagcgctggcgccccgggctgcgggtgctgaggcggggacggcggcgaagagggggaaggggaggagggggcggggagccaggggctcccggaggaaccgcagtgcggggccgggaccacctcttgcctccgcctgcttgtcctctggcgccagtttcctggattggaagcaagaccctgcccagaggcagcagtaacggcagcgacttagattgaaccacttgctttgtggtggagcgtcaagggccccaggttgtgtgcgtgtgtgtgtgtgtgtgtgtgtgcgcgcgcgcgcgcgctctggactaaccagtgggttggttcacctgagcagaaagtcagccgtaagctgaaaccgcatgtggccccctggccccttcgacttttggcttgtgtcccagggactcgtacacacggtgccagcaaggggtaagggtgacggagggatttgtgaatggtgcttctgcgtgcgtggaggctgagccttgctgatgtaaaggaggaggtatccagagtgagaagaaaggctatttatggcaaagagttgtgaaatttcttggggtttccttttagtgtatcctgaactgctctctttctctctctctctctctcctctccctgcctcagaattagaagcaattatgcttccccttcctctcgtgggacatggaatatgaaatgaagtaaaaaaaaaactcatatttttacaggtagaaaaaaatacttcttagaagttacagattctttgccctttaatgtttttatgtcctcttctccacccctcttaccttttcaggcagtcagtaggacttacaagtcagaaaatacctacttggtttcaacagctttcatttctgaaatctttacagttgaataccttcctattgaaatgtaacacacatcctcccttctctgcccctcaaggactattaaaaataatgtgtacacgtttaaagtaaagctggttttattaacagccttagggaaaacggataagaggacacctaggtgggggtcagttatcactggttccttcaaaactggttattaagggaagacctaaaatactggtaatctaggctataatataatttgtcttggtttctctttctgtttgctttataacaggtacatgttccagatacgtaacttgaaacttaaagatgccttgggacagtgcctgtcacggtgcttataaaatgaatgttttctcttaaaagtagcaacctgtacttttatagaactgtgactgggtttagtagtaggacagtatccttaatattgcaaactgaaatgtctctaaaagcctgccaagacaatgtttttcaaatattgaaattccatgttgtaaccacactttcaatagtttcacagagaaaaaagagaagttggtcaacctattgtcagagtgatttgtcttcatttaaattaattagttattttgatcaaaacaaaccaactgttgtttgtattgttttattgctttcctaaacagtcctgttctttgaaaaacaaagcagagttaaggatttgatattttgattttgttagatttatattactttgaaatacattttcaacacggaagcatgtgcagctttaaatattaggttagaactcagatggagaaccccattcggagggttattacctcaactatcccaaactatttgaacatagatataatagggaattaaaaaatgtaattgatgaactgtattattgcaatcattaaaagtcctatttatgagtattttgttttttgacagttaagagaatcagcaactgtttattattttaaagatacattatttataccatagaatgttaatttagataaaacaaagtagaaaatgaaaaatttgttatatttttacagtaatagttattcaaccctttattgcattttattactcatcataatgctcataataaagggcctaacgtttgcaaagtactactgtctaggcattggggaggaacgggagattccttgttccctgtctttcaggaacttacttgccatgtgggaggaatctgatgctcatgcttgagcgtagagttaacaacccgtaacaataagagattacatgtctaatgagtactacaggagttcagaacatgacaataacatttcatactggattttgtttgagaatgcttcgggggtgggtaagacttgcttgatcttgatgttaaaggataagcaggattagtacattgtggataagaaaaatataaggtataagatgcaagtctcctggaataatagaaaagaacatataagggaagataagtttgttttgatataaattaagatattgctggatattttgcagagtgcaggttgagtctgttttggatgtacatccttctacacattctattctttttttttgtttgtttctgagatggatttttgctctgtcacccaggctggatttcagtggcgctacctcggctcactgcaacctcagcctctcgggttcaagtgattctcctgcctcagcctccggagtagttgggactacaggcgcatgccaccccgcccagctaaattttgaatttctagtagagatggggttttgctatgttggctaggctggtctcaaactcctgacctcatgatcaacccgcctcggcctcctgtgctgggattacaggcgtgacccactgcgccctgcccacattctattcttgaatttaattgttaatatttacacatttaagaagacaaatctttagctttatgttgtctttttgtttgttagtttgttttttgagatggagtttcgttcttgtcgcccaggctggagtgcagtggcgcaatctcggctcactgcaacctccgcctcctgggttcaagtgattctyctccctcagctccctgagtagctgggattacaggcacgcgccaccacacccagctaatttttgtatttactttagtagagatggggtttcaccatgttggccaggctggtctcgaactccggacctcagttgatccactctcctcggcctcccgaagtgctggggtaacaggcgtgagctaccacgcctggcttatattgccttttaatagacaatatgtacttgtattactacagtagtgcaatagagttcttgtagagaatatgtactttaaatatttaaatgtatccacatctcactaatgtgttgagtaaaagtggcacacctctttatagtgaggtgttttcggtatttccctaagcaaatctttttaggtttgctctaaagaagtgtgatgatgtgtaaaagaataacagtattaatagtgagcatctattgaatactcaacattttattcttcatataaaatgtgttgtctattaatatatttcatataatagtttattttaaacttcttagatttattgaatctattagattagattttatttaaagttattgtatgcagccacataatagttaatctatccatatattatttgccataaatatagagctatgatacggagccyatagtgaaaattttagaattttagcaacaattttatggctattttaactatcttctgataaataaattgtattaacaataacaccatgacctgtctctaaacttagttgtttttttctttgtgtatataggttgattttagacaaactgcttaaaatgcatttcttcatttcaagaataaaagggaaacatctgagttgactttgagcctgtacattcaatatgacaccccagaagtatgttttggtgacagtaaagaaattgcacaaatattagacatgactttcaataaataaccaaatggaattactttcagattagttgaattaaaatattttcatatatatattttgttgacagtgaatagataagagttattacaaaagtgaaagcctatttaatcaccaattttatattcatgcaagaatggaatgattccccatgtagttagggtacaaactagcctatctgttaattggtaccttttgaatttggttttggactatatgtcacaggtgtatcatttcgataatgtaatctcgtccactgtatgactgacagcttctgcatgatttccctattggacagtgacaaaatctgtttgctttatagtgagtacatacacttctatcagcaatattatcttccctgtgcaagagtgtcagttaacaataaaacatgaagtctggggtgggagaagcagtgaaaaaagatggggagattgaggagaaaacactgtaacaaaagaaacatgttttactatgaagcttaaactgaatattaaaatataaagctgactattctaaactgcagtacattaccaagatattgttatcagtctactttaaacaaccatattgtattttaagttgtttccatgcagcctaaatttttttaaaaggtgtttgttggaaatatttactgaggtgtttgatatattacaaattgttaaaagatttctgctcagatcattaactaatgaagttatttgccaaattcctggccctatacctggaataacttaaagcacggcttttggttttgcatcatttacactgcactaactcttttcaaatattaattaaagttaaacttsattaaaagttttgaatttttaaactgtgctttgatactaaatacagtccaaaggacttttataaagaaacagtttattatctagtgacaattcttaacctagagtagtggttttcaaaatgtggtgtcctaagcagcaatagcagcaagtataaacttgttaaaatgccatatctggagccccaccacagactgattgattcagaagctctggggtggggttctctgtgtgattcttatgcactctagaatttgaaagccactgacctagagtattttagagtaaaaactgaaggctatgtctttcttctgttttataaataaatacttccctcagctggtagtaaactaaggttcagatattcagttttggaaaatattccattgtccatcaaaagtttttcatcttaactatgttttctgaccaamtttttaatgagttcccattgcttgtgcaagaatttgctgttgattggggagggaatacatgaaaatttaactggatagtaatgactgtaggctggaccttattggtaggtagttataatgcaaagggtatgcacaatacaaaagttgaccaatttctgtttagttttgttgactctcctgtgatatttttggttttggcatatagtaagcacctttctttggataagattatagctgttttagctgtacaataataatatcacacatgaaatattctaagtcccactgctgaaataaattttggaccatagctctacgtctttcaagcttaaatataatgtgttcacatcctgtatcacctttataccactgtttctctccctttccaccgaacccttgcttctctatttcaatcatcacttccctagggatacctttcttggccttgttttctacatcggttgccctgttatatatagttttgcattatgttcctcttccttgtggtacttttggcagtttaaattttacctgttttgtatgattggttcagtattgcttcatcagtgttagcaatgtccagcacatagtagacgcctgataaatagtgcctaaaagaatatatgaataaataactgagcttctttgccttcattctgagaatgttttattttttccaaagaaagaaaccttaagaaatattaaaaataaggggagtcttagaatttttgcaaacataggtatttcctgttttgcaaattatgaaatattattttattaacaacaatagcaatgactgtaatgtgctggacacttcttacatgatatacactttataatgttatgtcatgtcattctaacattgtaaagttagtttgatgcatatattagagatgaggaaaccgagtctctgttctatggtctgctaaactatatagaccaaactttgatttttaaagtgataatgatgcaaaaattatgaaactcataaacagagaaactctgaaggagtatatctcctctttcttcctaatttaaccaagggcccagcagcaatatctgtgtattacctgtccttttgccaccatcttgaatgatgctgccattgcttcttgggtcactgaggacttggagatggaggacctgcaaggctggtactcccatcttcttattgctattttcagtggggatattgtgcactctcagtgccattcaaccacacttctcttactctatttagtcagaatcactgaactctttaatgaaaatttaagatgtaaccaagtataattttgtgaatgtgtgcgttcatgcagagaaagttcagacattagatattccacttcatatttgaagttatgcagcttatcttctggaaaggttcatgcagagctttgagcatgttgcttaagaaaagttgagcttatgcacaagttatgaatctagctttccttccatgaaaaggaaatatgttcactgctgctatcagatttaatttagtttcttttaacttttattcttcagttcatctatttaactgtggatttaatcagtgttcacatatttgtagcaaaggatatatttaaaggctgatttcatagaagtaaatggacagaaagttaaatttggttattttgaaactctcttcaagactatacaaagttatatatattttataatgtgtttaaatcagtcaaaaccatgaataaaactagattaataatatcaaggattaaaaaatgtttttttaactaatttttcacttatggcttattttgtagcttttgtcaaaatctatttctgttactggaagaatgaactctaacttgagccttaaccatgctcctgattcggaagcattctttctatataatgaaaaattaactgatttctagcctaacattttgtggcttaacattaagcagcctttgataactcaactctaacattacaacgtatttctagtaattaggcttacttctataactgaaactgatttctcgcttaatattttgccctgtatcttgataaattacccaatctcactattcctcctagcatttgagcaagaccccccctttgaaaaaaaacaacaactgggatcctgcctctgaaacaacctcattttttwaaaaaaagactgggatcctgcctctgaaacaacctcatttcctgagccattttatctgccagcagacaccagaaaacacaacactttcctggatctccaaacattgctagctcttagaagtatgcttcatttcaatactcactcttggatttccatgatgccaactacttatggcatattgccttgctcctgcatagttagactggttagactttttctaagtatttacagctgtgcctctggagtgctttctaaacgacagtgcagttgtagtaccagtttaggaccatcgccagactgcctcattttgctgaatgtaacctttccttacctggctgtgccccactagaaagatagtcatgcatcatcattgacaataaatattttataaatgtttattatagagttgaagtccgtcagtttcaaaaataatcatgcacctcttattggtattatcttaaagtataaattaccaataacttatggtgtttactgaacagcttaatccacaataaatgaaatacttggaattctgtatcttatttggtgtccaaatgtgatatgtgtgtacaaatatatgcacaatgtgcatatgaattctttagggtttgcctgtttctctttttctagtcacctaagttcatgatgatatgactcttctgcagtctccttcataaccttatttgtatcttatgtatttagaatgtagaaaaattgacgaaatttattccacacagtaagttttcttctctaatttctccagttcattagtgaaatttagtactgctcctgtactcaaggagtgtttattagctgggtgtggtggagcactcttgtaggtcctagctacttgggaggctgaggtgggaggattgcatgagcctaggagttcgaggctgcagtgagctatgatcacaccatgcattccagcttgggcaacagcaagaccctgtctctaaaaaagaaaaggtaaaaaaagaagtgtttgcttagctaagtgtactactctaattcagcctttatggggatatcagtgatataccattcttattaaacaaattcagactaagttgttgtatttatgtacctattcactgaaattagctctttcttggaagcaaatattatgaatctgttaatgaatgtttgttgtgtgtgtgttttgcaatagcagtaaataatgtattacaaacctacatcatgtttacaaataaaagccaaccaaacatgaattagaggcatggcaaaaataaatggctaaatttctaggcaagtatccctttagagaactgtttttgtttgtctgtttagttttgtttattttatagatatagaaaggaccaaaacgttaagtctgaatatataaaatggattgtgagtgcttcttgataatagacaatattcttcaagacatttaggaaaagctcgaagtgagaaaaccatgcatatatcccagaaaccatcaggtgagaagttaggaaaaggaggaaaatactagctctaaacaagacccaaattcattgttataaatataaattaagaataacttatttcaggtaaagtttcaatatattttagaggtaacaaaaccccactgagtttgtacaataagattcttaaattttcaaaggaatgttacctagtgcacagatagctcaagaataattattgactttttcagctagtaatattgtattcatgtataaatgacctaggaatattaaaagtactcattaataaatgagctccacagaagtcagaatgtgactcccataatgtaaatcttaaaaattaaagtacagattactaaactgggccattaaatgaaacattacaaatttgtacacaggtatataaacttttagaaacattatgactaaaattgtttttgagaggtattccttacagggtacttcaaagtataaatataggggaattggagagatagcttcattatcaacaacaattcagtttctgataggaggaagggacctgaaatgggaagttttacgttgattatcgggacaatatagtatgaattctagcctggcttggaacacagaggggataaagaccccagagtggtaactatccagtgaggagaaggaaggtattgcctcccaggatatttctgaggagagtcaggttcattggacggtgatatagaaagtacccagcctcagaggcctggttcaggaaataaatggatgagatattttaaaagctaaggaattataatttgaatacaaaacagattagtaaatttgaagttctggagattctctaatctcaattccaatctgctagccatcagtctgcacagtcacctttgacgcagaggagctatccagggtactagatcttgctgacctctcttgcaaaaatgcaaaacatgccgtttttgtttacgttaatcatagagtctgctgttgcagatgctacgttacttaactgcagttactaaccttccatcatttggcttattctagtaggcccttcaaagttctttttaaaagtaaactcatggaagcccatctcaattccacataagaagcatattctgagttccagtaatattctgtgtatgttagtatcaaatctccattgaaagtatcataattcactgcttgtttgtacttaatgctcagtagatggtgagctctatgagggcagggtttttattttattttattctctttccccaccagctggtctaaaccagaggtgtaaagatactcagtatggaagtgagaaatggatgaataaatgcactactacttaagagtgacgtggatttcttttttaaatttttttttgaggcaaagtcttgctctgtcacgtaggccagagtgcagtggcacagtcatatctcaatacagcctcaaactcctgggatcaagtgatcctctcacttatgcctcccgagtagctgggattacaggtgcgccccactacgcccaactaagagtgacatgaattttgtcggcattatgtgaactacttccagtgctaaccactgttctgaatcctaccctaggctcactttgaacactgccctccctggctatttcatagactgaaaatttgttcttaatttggagctgaatagccaacactggctaaaattcttaaagtaaatgaaaggactggaggaatggtggcagctaaactacatgcattaggggttagtgaggtctagggaagcaagaagcagtggcacaggccaatttggagaatggagatcaaaggagagttggttttgtcacttcctcaaaccaaaatcctgaacacctactccatgttcacttttttttttttaattattttactttaagttctagggtacatatgcacaaggtgcaggtttgttacatatgtatacatgtgccatgttggtgtgctgcacccattaactccatgttcactttttaagacctttggaatatggcattttcttccactttatacagcccagattcacattttgaaatgttgacaaatctgaggtcatgtgaggctgtcagaattctttcattcagtaaacaaatgttactaggccctatgcatgtatcagttaatgaaacccagtatgtttcctgtccccatataattgatggtccttgttgagaacagaagttggtagactttttttttgtttgtctgtttcttctagtagccatgttagtgacatcctagcttgctacacagagtgagtgtgcttgtttccagatctccaacctgcctcctcacatcattgccctaagtttccaatgtggcaaaaagggactaagtcatcatagagaaactcttatttacataaaagatatcctgtcactagtgtggtattgatctgctggtcagttttgcatgatgttggtaaattatgtgcctgtatatattttcccttatagggatattttctgaacagtttaggttccatggtttctattttggtcagaaattccctgtattccaagtgcataagccatagaaaatagctgtgtgacctttagatggagtgtattttcactttatagttctagctttcatgtttttgaagtatatatactatctatccttcaggtcatatgttcctgtttcctgttttattttattttattctatttttttcacgtattgccaacagtaatgttccaattatgaagtagaaaaagaaaagctgtatttcttggtaatttttttccttgagaacacaattgtgtcactcagagaaataatgtggattcagaataacaggtgtaaaagtatgaaaatgaagctcggtgcagtggctcatgcctgtaatcctagcactttggaaggcggatgcgggcagatcacctgaggtcaggagttcgagaccagcctggacaacatgatgaactctgtctctactaaacaaacaaacaaacaaaaattagccaggtgtggtggcaggtatctgtaatctcagctacttgggaggctgaggcaggagaattgcttgaattcagaggaggaggttacagtgagctgagatcatgccacttgcactccaacctgggcgacagagtgagactccatctcaaaagtaaagaagtaaataaaagtatgaaaatgaaaaatgaataaagcaaaagatctcggtaatcatcttgaataaactgattatttaaaaacctaaaatttctttgctaaatatttacaattatgtcaaataatatggtcatcattaattgcattgattaaaagccacttgtgctattttctaagtattactagagctgaaatatacataataaaaactatgtttaatctatctaaaataaaagttgccttaaaaccctttcaagagttagcatgtgtgcgcaaaatttaggtgttttgtagtgaaacttaaagggatgaattttcgcaatcatctgaatcatttgtgttgtgtaaatatagccctaggaatcctcagtactcactcaagtttaggactccttagggaccagaagtgatgattgtctttgattttagagtgtgtttatagaaagatggggtcctgctgagattacattcttctttgacaaaggaaagtagttcagttcacactcacatcaaaaacaaattttattgaattaaaaattttttactggaatattttttgacatgaagacaaacttgtatcaatctttgttatatgtgtgtacgtacacatgtacacaggtatgtagtaattaatttcttatgaaaactgtcttgtataacttacttccaatcaggtatttttggtctacttttttttttttttttttttttttttgagacggagtcttgctctgttgccaggctagagtgctgtggtgcgatcttggctcactgtaacctccaactccctggttcaagggattctcctgcctctgcctcctgagtagctgggattacaggcatgcgccaccaagcccggctaatttttttgtatttttagtagagatggggtttcactatattggccaggatggtctcgatctcctgacctcgtgatctgcccgcctcagcctcccaaagtgctgggattaccggagtgagccaccgcgcccggccttggtctacttttttagaatgaagggtttagtgttctccagagaaacccagcaagatatctatctatctatctatctatctatctatctatctatctatctatctattrtctgtctacctattgaaagactaattttaagtaattggcttacatgactgaaatctgtagaaccgactggaaggctggaaactcaggcaggatttttatattacagttttgaggcagaattctttcttttccagcaaacatcagtttttattcttgatgccttcaactcattagatgagacccaccccacattatcaagggtaatctgctttacttaaatgattgtacatattaatcacatctacaagatacctttacactaacatccggagcaatgttttatcaaacaactgggcattatagcccagccaagttgatacataaaattaactaaaacaagggatgaaaggtaatatgttaagctctttctgttttacataatatgttagtgtatacattttctttggtcagagatattttagcattggttagttattggtatacaaagacacaggtcatcatttgttctttatcatttatttaacatgcaatatgtgcaagagacaatgctatgcaattgaataatttttaaaaaatgaatgaggagactgtgtcttttaagtttgttaacaactctagtggaagagccacaagtgtgttagatgactgactggtaaataaagttgcagaatgaaaatgcacatttccaactttgccgatgaaatgtcattttacccatgagcaatgcccctccaaaaaccccttatgtcaaggctaatatgccaagttattacacttgttagtttaaggatatgttgtgtgtaaaataggatcctgaaaggtatgcttgcccactgcaggtcaacttaatttggacaatgttgactatgcatacatttattttagcacattaatgggtttgtacctgtactcgacctttgcaaaggtgattcaatatatgcccagagagccatgacaagtggactgtcacgttttattgatagtcttgctcttcatgtagcatagagtaataaacatttgctttactggctctaaataggtatttttaatgccttcctattccaaaactacattgtgtttctgtgtttttattcaatgaatatggatttgtctgcctggctttggaggccctttgtgagctcaccacactttgttaatccaaacacagatcttctactttgttaaggtcatgtaacttagagcaccctcacacacaaagcatatgcatttaatcctttttgtttatgcaaatctcagctgtcattacaggcctaagtccatgaaaccttccatgacgactttaaccctcctggggagtttcttttgcascactctgagttgtgagcaatacctgcttggcaccagacaattaagtacagtctgttctgcaacaatgcatttttctgtagtgggaattagctccaacatgatgggtaaataggggaattgtgttagtaaaatgtggaagttctttcatgtgtgtttttccccaagcataatcatatttagctttgccaaataactayagctgaatgcaaaatatactaatacaggcaaatgcacaatacarcagagggatatcgttttatttatttaccactttttttttttttggtatgagtaagccacaattttagctttgaaagtgcttattgtgcggtttttcttgatccctgcagcctctggctaccttcacttttttttaaagagaaaatttatgtattctctgtattatttcttttctttactgagaattttacatgtccttttaggcatataggatttttataaaaattgttatggttttggttagaactttgtgttataaattgcatagattttaaatgtttctgctacagttctatttttttattatccctgttatatttattgcccagtttttcagaataaaataacacatatattgcaatagcaggagttcggcaaatttacatgaaatcacttaatttttatttaatatccactatttgtcacttcctagtgctaatgttggatgtatgaaaagtgaggaagccttacttttttgtacattgggctttctaagcaaatatctggtatgatggtggttgtaattcttggctcatttgaaggggaggaagacagacaatgagaagtaactgtgttactgcaaacatcagttccagcaaacatgtttttgttcttccctctgcctggaatggtctcccattcctgccgtattaagccaatttcttctcaagcttcatctctcaagtcaagcatcatgtcttcatgctattttaaaytctcactaccatgtaccatatacctttctttcatagtctttaaggtagctgcaattttataatcatttgtcagattatttaaataatatcttttttcttagaccataaacttcctgagaacacagttcatgtttggttttttccaccattgtatttctgtttcctagcaagtacacacatacacacacacacacacacacacacacacacacacaccaggtattaatataccattatagaatacatcaagtattcagtaaatttttgttgaatgaatggattattgaataaattaacttttcttttttcttttttaacaactaagtcttgaatatgcttcctagaatcaattattttacttctccattcctacttttttttttttttttctgagatagagtcttgttctgtcacccaagctggagtgcagtggtgtgatcatagctcactgcagccttgaactcccgggctcaagcaatcctcccacctcagcctcccaagtagctgggaccacaggcatgtgtcaccatacccaagtcatgttttgttgttgttatttatagagacagggtctccttatgttacttaggtttgtcttgaactcctgggctcaagcagtcctcccacctcagcctcccaaagtgttgggattacaggcatgagccaccaatccttgtccacatctcctttgttatcatcacatttcctggtctgtattcccattacttgtaaagccacttcagcatccaaactgtaagatatctttttaaaagggaaagatataaatcacttgttacttgtcaggttgttccatctactgcttttttctctcaaaatttggatttgtttcttgaaatttcattttattataattcacagctttcctgaaygtgctcccataccttgcctgttcaaattatagctaggtaatgtttatattcttgccagggaaacttgattgtggaaggaaaagtgtgctgctattcattggattaattgtggatgacatctttgctgtttcctattaaatatgacatataggtagctagattatttaaagtaaaatatcattaagtcaagtacctgtggatgatcaacatatagctcttgtaacattcatcccactatgcattatgaataactgtttcactgcgactgccttggatataaattattgaggtgtttatgaatgtggactcaaatttactcaatgcacacagtaaacagctgagtaaactcctgtttaagcagtgagggaaaaatgtgaaaaagtagtggaatatagttaaaacatatctagtcatcatttcagtcattaataacaactggattctagattacctggactatttaaagtgtttcaagaatacagtataataatcaaataggaatttttgctttcacaattacatgcagcgaatttcagatattcagactatgtagtattttatgcattatgggaaaatttttatgtaaattattttattctaatgcttaggttcctctttgtgagttcaaatgccccatttattcattttgataattgtttactttttgtattatccactattaatctgttattatgtaatattctgaaaaccaaccaaagagatcagctcatctaaattaattactgctgagtattatttctacaaaattttacgaccattattttcgtttcaataagcaatctattttctggctacctatagtttaattttgattataaaagcatgatggcccgtaaacttccaggtatcaagtattatgataaaaagtcaaagaatctatttctctttgctttatagatgacatttgaaatgctaattctatttttatgttactttctacctttaaaatattctaatctcataggccccaattagattttaaataaaaatctcagagaaatagggtaccttttcaatttaacaaacaaaatacatcattttttatgcataaggtaactccatgtaagtgattgtggaatgccacataatcaaaataactcataaataattaaagagtcacattataaaattaggaagtgtaaaagaaacaataagtgtactcctgcctgctttttgtgtcatatgttgctgcctttaaaatacaatttcattgctgtatcagtgtgcttttcagtttcatgctctgcatccatagttggatttacattgtctgtaggcttgggctgactcaccgtatttaacatttcaatatctattgtgtcaagcgtgattttgttttttatgttcacatctgtgtttataggaactggctatagatgcctaaactgtgagggaatatgatctttatgcagtcattgtcttaagataggttacagagttttcattgttgttttgactgtattaacattttctatctgtgaagtgttttgtaatcaaaattctactttttcttttatcatgtcttcattctttggagtttttaaaatctggagctaaaattaagcatccttgcctaatatgtgcaataaaaacaaaacaattgaacagattataaaaaattttaaaaggccagaattttcatataatgctgatctatgcactcataggcattgtcttagggtacctttttttccctgtgacattgacaaataaacagctgaagatttgttgaaataatctctgaagcactattatatggcttgataattggcatttgcaggaagctaactgttattatctatgaattaatactcttaccttcccaagacttaaaaagaaaataaactttaagtgggaaaaatgtttcaaagtgaaatattcagctaaagtagtgaaaaagaacaagtgagataagtactgctcttttgatgtgtgattctgtaaccttctcatttttaayattcttgtatttctagtcttttgagaagtgagctccaatttatatagcacagatgtagaattttaatctacatctactgtgcaagaacaggagatcagaggaatattttaatatgtaaagtctctttaaatttttatggagcataaaataatactttacccacattatgcttgttctcatgtttaaatttaacaaatgtaaagggcatgatctttagatcatctttttcctcttaaaaatcatctcttttacggtgcatattaatgtctgaattagcctagaaaaacagctaccgtcattctaattactggcagctttggtccagcagcttgtactcggttcaaagagcagatcacaataaagatacacattaaataataaaatacggctgtgaacttggaaaatttagtttagtattaataattttattaactcaactgttatcgaaattggcttagtgtaattttatgttagctaattttgatacaattggattatgttcataaaataccttaataatttatacagaggattatatatcttttagaacagcacttttgaaaatttttcactagaagatgatcaattttccttaacttgaagatgtggcattactttgaccgggctgttatgtgtttgaatttggtcaaatcagtatcaatgctgctaatagtttctgtaaccacatgaattatttccctttgaagacactatgatattcttttaaaagtaattaacacataagattaaatattcatttttatgatctcaagaatttatgaagtcaaaccacaatgtttcttctaattgtcttcaggctacgacttgtattttgattattttatttatttatttacttagttgtttaattcatttgttcagtgatttatttatttactattgtatttatttatttttaatactttgtttaataacttaacagtcatttaatgctttccatgtgtaagacactttactgtgtctttctgtgtgtaagacactttactgtgtctttctgtgtgtaagacactttaaatttctcaaatttaatgatctaattttattctcacaacaaccctatgagataggtttttaatccccattgttgtttataaaaatagagacacagaaaactcattaacttgtcaatgattacacagtttgttgtggtgaaatagttgttatttgggtttaatttatataactgcttattaggtcaaaagtattccattataaatgagactttacaaaccatgaattgtttctggtttattaaaatatgcatctagtaattatagatataaaagtagtattggccatgttcaagtaccttacaggctaytctagattaatttgaaaagataattttgtgaaatgcacaagtgctaattatgcatcaaagtgagtagcatttgaacaattcaggtgtactaaaagcaagaggcttataatcctgataatcttcatgacaaaattatttcaggtttgaaaatgatatgaatacatccgtaaatacaaacatttgaaaacattttcacatttttattctaaaacagaaatgccattatattggctgtactaatgtgcccttaaaaaaaaagtaagattgtgaacatatgctatgtaggttagaatgtgattgtgatcaacataattcatttgaagagtataattataacaatttaaataattttataaaaggccgggcatggtggctgactcctgtaatcctagcactttgggaggccgagatggatagatcacttgaggtcgggagtttcagaccagcctggccaacatggcaaaaccctgtttctactaaaaatacaaaaattagctgggcatggtaacgcttgcttgtaatcccagctacttgggatgctgaggcataagaattgcttgatcctgggaggtggaggttgcagtgagccaagattgagccactgcactccagcctgggctatacagcaataccctgtctcaaaatgataataataataattgtatgtaattataatttaaattttatagttataggcaacctttaggagttaaagaaattaatggtttatatttttcactcaaataaacacatgtgcataagaaaaataatagtacttgtaatttctgatagtttgtggatccactagagtatccatgaatttatttagaaaagcccagtattagtctcttgaaaatattcaatcaagaaaaaaattgtacagtttttttgcattgttagtatacttggattgacaacattataaaacaaacaaaaggcacaaagaaatgcatattgtctaggatatggtagtacaaggttgatatagatgtgatcctggtcgtagagtaaagggcttcttggttagagagaaggatcagagagataggaatttacctacctgccataacaaccaggaacaaagcattcctcagaagttttatagtctgtcatcttttttcccaaactctatctcatttgaacctcactgtacaattattttgatttcagttttgcaatggacaaacctgaggattggaaatcaaatgttttgcctatgatgtcactgtgtaattagtacttctggctttagctgacttattttttttctctatcttattctgtggagctatcaagctgaacctgtaactcaagcatacctatacgtctactttcctcctagaaggcataggcattggaatactgtcttttaacctcttgagtcaatcttatgcttatttttacaagtaggtcacaccctaactaaaagacatgaataatgacatgcattttagaatatgaaaggcactttggctttgttagaattttatcagtgtttcttatgacatctatttccgaaatcccatgatgtttgtaattgcaggcaacaccaaatactgataacagctgtcagtatttaccagctactgttctaagaattttacatatagtaatgcatttaatcatcacaataaccttatgaagtaggtgatatttttcttattttgaagatgaggatatggaaggatagatatgctgagtaaatagcccaagttcaaagagttagaaagtagtagagcagaaggggccaatccatgcagtagggctctcaaccacctcaccctatatacatggaggctaaccaaagttttgttcatgaacatttgctattttattgttgctgttttcaggcaaagccatttcattgccctttgaagaacaatgggagtctaatattgatgaaattgtccatttctatgcttgacttttatattggaggtagtgccattaatccagcatcaactgggaaattactcaaatcaggtggactagtctgagatttctctaagacaatctcaacattcagttatacttaaaaaatgtgttaatctttgagaaagggaaagcaagtaattgaaattaaaaataaacttacgaatatctttggcctctatatgacaattttggaaaaactgtatataataatctaaaccatgatacttctttaggtagtgtttgaaaatcagaaacagacttgttcttagctgaaaattttattattataaacttagtgctcttgaactttgcttaagatatttaatgatgcaggaaaaatagaaacattcagtaaagaaaaaaagagcaatatatttttcatattcaagttaagtctgcattgtatgtaaaagcaatcatttaatgttttttggagtaaaataataagaaacttttattgacaggtcaatgccataaggaagttggaaatcaccagtgtttatgttgacttcatgagctataaagttgacccttgaacaaaatgggctaactgcatgggtccatttaaatgtggatttttgcaataagtagggttggccctccatataggggataaccacatcctcaaccaaacatggattgaatatattcgtgcaatgaaaaacccacataatagcaagggctgatttttcctatctgctaattctacaggaccaactgaagtaacttgaatatgtgcagattctggtatctgcggggagtcctggaaccaaaccctgtgggtaccaagtgtattcagttttccaaatgagtaaaatatcattattagttagcctgagtttcctatttatttttctgttctttttttaatagcgactcccatagtaacatcagtcactgttgcaaatgtgggcaaaaaaagtggggtttcacacatttggtgaattcctacgtagttattagtggggaaaggatgtcaataatactgcatcttgctgctttaagtataagagatgcatgacttgtgaccactgtgtatgtgtagaaaacgcaccttttgttttttaaaaaagattattaccagctcatgaagcattttgaacatataaacatttacttgtaattgtacctcattcatcttcatcactcttatcaatgtcctaaatgtaataagcaatttgttgttaaaaccagtactgaccacagtgatcattttatgtataggacaatgtaattattaagaagaaaaaccaatgctttactaagtaagccagctctattctatgtaaatatccatatagaaaacacatttgaagctgtgcactgggtttaatatttatatatagatgtctttaataatcagtttgtgtatttaaggattcaagtagttattattaggtcagtgaataaatgtatccaatgtatctcatcattctgaattattttattgctttgcagttggagtttatttaaaatattactaaaatctttttgaatagattgttatttttttttcctcctcacaaaagcgaagcatttgatttaataaaaggttccacaaccctgctctggcctgacaaagacttgcttggttgattagcatgaatgagaatatgaaagatttaaagaaaagctgtcaaagcaattagaactaaagtcctcctatcactgaataatgaaaatccaggcctggaacactttcaaatgtacctaagaaaatcgtacttatacaaaatgaaatgatagtgaataaaagaaatggaataataaaagccaccagaggtaaaattgtacaggtagcattttaatatattcttgctactatattttagatttattaatgaacataatgatatatggtttcttcataaagatatatgtatcaattttaatttaggtatttatttagattattaggcttaatattcaattgttttaaaatgtttagctttaagatgatttctataaagtctaccatttgggtgtctttctttgtaatttaacttttagatcaatcatttaaaatcaaatgtggatattcaagctacaaaagagattaacaggcatttaatatttaatatacaccctttytcttaatgcttttaaatcttaaaaatctagaataaattgatagactgtcagaatactttgtgtgattaagaaaactaatgatacaaagagtacacctggagagcaaactcataatcattttatatttttattaaaacataattcagtctaggagatcattacatcaatagattcttttccatttgttcagttatttaagcactcagttatttagtattaaacaattattttttcaatctttacaatgtaaatttgtatttacatttacacagtgaaagataacaagatgagttagacatggatctggcattaaagggcttgcagtctaaggaagtagctatgataaatgtactatagatgctaatgcattaaataggtagaatataaacactataaagtgaatataaaaaaagaagagattatctccagctctattaagtaaaggaatcaccactgaataagttatattagaatttggtccttaagtctgtgtatgcatatcattttaaaatgtttttgactgcaagtaacccaaatcaaagtatcttaaacaacacaggggatttcttagcttgtgtcactaaaagggtgagcacagacacagttcattagagcctctgctttatctctctctgctctatcacctgagatcttttccctgactagtaggagggtggcaggagtgagttctgaaactcacaactgtgcaccacaatctccagaagagacactgacccagtatttcaagaaagtgttctgagagctaccttgattggtgtgtgtaggttaaaaatttgcccttaacctgaggccaggatgaaggaatgggcatactggcctaagtgagccaaggttcatccctggagctgaaaatggggcttgattttccctgagtattcagctgcatgatggagaattttgggatattacagtgagcttatgtgtactgttggggatgggaaagggagaatggatcctgagtaggcagcctacaatgtccagtggagtgtgatttagacattcacatttgaggaaggttattcaagcacagtggattatgtgaacatgtgaaggaaggaaaatgtaacgtgtgtgtagagagcactgattattgcagtttggctgagatagagagtgcccaaagggaagttattggaaataacatcaaaagagtaaattggatcagatggtagaataccttgaaagctaggcagtgaaatttgggatattctgtagatgatrggaggtgcttaagcttttgagcagtagaccagcatgctcagagttgcttttaagatttgtatttgtcagtgctaggtttttttttttttaattttattttttattattatactttgagttttagggtacatgtgcacaatgtgcaggttagttacatatgtatacatgtgccatgctgctgtgctgcacccattaactcgtcatttagcattaggtatatctcctaatgctatccctcccccctccccccaccccaccacagtccccagagtgtgatgttccccttcctgcgtccatgtgttctcattgttcaattcccacctatgagtgagaatatgcggtgtttggtattttgttcttgagatagtttactgagaatgatgatttccaatttcatccatgtccctacaaaggacatgaactcatcatttttttgtggctgcatagtattccatggagtatattgccacattttcttaatccagtctatcattgttggacatttgkgttggttccaagtctttgctattgtgaatagtgccgcaataaacatacatgtgcatgtgtctttatagcagcatgatttacagtcctttgggtatatacccagtaatgggatggctgggtcaaatggtatttctagttctagatccctgaggaatcgccacactgacttccacaatggttgaactagcttacagtcccaccaacagtgtcaaagtgttcctatttctccacatcctctccagcacctgttgtttcctgactttttaatgattgccattctaactggtgtgagatggtatctcattgtggttttgatttgcatttctctgatggccagtgatggtgagcattttttcatgcggtttttggctgcataaatgtcttcttttgagaagtgtctgttcatatccttcacccactttttgatgggtttatttttttcttgtaaatttgtttgagttcattgtagattctggatattagccgtttgtcagatgagtaggttgcgaaaattttctcccattttgtaggttgcctattcactctgatggtagtttcttttgctgtgcagaagctctttaattagatcccatttgtcaattttggcttttgttgccattgcttttggtgttttagacatgaagtccttgcccatgcctctgtcctgaatggtactgcctaggttttcttctagggtttttawggttttaggtctaacgtttaagtctttaatccaccttgacttaatttttgtataaggtgtaaggaagggatccagtttcagctttctacatatggctagccagttttcctagcaccatttattaaatagggaatcctttccccattgcttgtttttctcaggtttgtcaaagatcagatagttttagatatgcggcgtagatttctgagggctctgttctgttccattgatctatatctctgttttggtaccagtaccatgctgttttggttactgtagccttgtagtatagtttgaagtcaggtagcgtgacgcctccagctttgttcttttggcttaggattgacgtggcgatgcgggctcttttttggttccatatgaacttttaagtagtttttttgaattctgtgaagaaagtcattggtagcttgatggggatggcattgaatctataaattaccttgggcagtatggccatgttcacgatattgattcttcctatccatgagcatggaatgttcttccatttgtttgtatcctcttttatttccttgagcagtggtttgtagttctccttgaagaggtccttcacatcccttgtaagttggattcctaggtattttattctctttgaagcaattgtgaatgggagttcactcatgatttggctctctgtttgtctgttattggtgtataagaatgcttgtgatttttgtacattgattttgtatcctgagactttgctgaagttgcttatcagcttaaggagattttgggctgagacaatggggttttctagatatacaatcatgtcatctgcaaacagggacaatttgacttcctcttttcctaactgaataccctttatttccttctcctgcctaattgccctggccagaacttccaacactatgttgaataggagtggtgagagagggcatccttgtcttgtgccagttttcaaagggaatgctttcagtttttgcccattcagtatgatattggctgtgggtttgtcatagatagctcttattattttgagatacatcccatcaatacctaatttattgacagtttttagcatgaagggttgttgaattttgtcaaaggccttttccgcatctattgagataatcatgtggtttttgtctttggttctgtttatacgctggattacatttattgatttgcgtatattgaaccatccttgcatcccagggatgaacccacttgatcatggtggataagctttttgatgtgctgttggattcagtttgccagtattttattgaggatttttgcatcaatgttcatcaaggatattggtctaaaattgtcttttttggttgtgtctctgcccggctttgctatcaggatgatgctggcctcataaaatgagttagggaggattccctctttttctgttgattggaatagtttcagaaggaatggtaccagttcctccttgtacctctggtagaattcagctgtgaatccatctggtcctggactctttttggttggtaaggtattgattattgccacaatttcagatcctgttattggtctattcagagattcaacttcttcctggtttagtcttgggagggtgtatgtgtcaaggaatttatccatttcttctagattttctagtttatttgcatagaggtgttcatagtattctctgatggtagtttgtatttctgtgggatcgtatcccctttatcattttttattgcgtttatttgattcttctctyttttcttctttattagtcttgctagcggtctatcaattttgttgatcctttcaaaaaaccagctcctggattcattaattttttgaagggttttttgtgtctctatttccttcagttctgctctgattttagttatttcttgccttctgctagcttttgaatgtgtttgctcttgcttttctagttcttttaattgtgatgttagggtgtcaattttggatctttcctgcttcctcttgtgggcatttagtgctataaatttccctctacacactgctttgaatgtgtcccagagattctggtgtgttgtgtctttgttctcattggtttcaaagaacatctttatttctgccttcatttcgttatgtacccagtagtcattcaggagcaggttgttcagtttccatgtaattgagcagttttgggtgagtttcttaatcctgagttctagtttgattgcactgtggtctgagagacagtttgttataatttctgttcttttacatttgctgaggagagttttacttccaagtatgtggtcaattttggaataggtatggtgtggtgctgaaaaaaatgtgtattctgttgatttggggtggagaggtctgtagatttctattaggtccacttcgtgcagagctgagttcaattcctgtgtatcgttgttaactttctgtctcgttgatctgtctaatgttgacagtggggcgttaaagtctcccattattaatgtttgggagtctaagtctctttgtaggtcactgaggacttgctttatgaatctgggtgctcctgtattgggtgcatatatatttaggatagttagctcttcttgttgaattgatccctttaccattatgtaatggccttctttatctcttttgatctttgttggtttaaagtctgttttatccgagactgggattgcaacccctgcctttttttgttttccatttgcttggtagatcttcctctatccttttattttgagcctatgtgtgtctctgcacatgagatgggtttcctgaatacagcacactgatgggtcttgactctttatccaatttgccagtctgtgtcttttaattggaacatttagtccagttacatttaaagttaatattgttatgtgtgaattcgatcctgtcatwatgatgttagctggttattttgctcgttagttcatgcagtttcttcctagcctcgatggtttttacaatttggcatgattttgcagtggctggtacctgttgttcctttccatgtttagtgcttccttcaggagctcttttagggcagtcctggtggtgacaaaatctctcagcatttgcttgtctgtaaagtattttatttctccctcacttatgaaacttagtttggctggatatgaaattctgggttgaaaattcttttctttaagaatgttgaatattggcccccactctcttctggcttgtagagtttctgctgagagatccgctgtcagtctgatgggcttccctttgtgagtaacccgacctttctctctggctgcccttaacattttttccttcatttcaactttggtgaatctgacaattatgtgtcttggagttgctcttctcgagtagtagctttgtggcattctytgtattttctgattctgaatgttggcctgccttgctagattggggaagttctcctggataatatcctgaagagtgttttctaacttggttccattctccccgtcactttcagatacaccaatcagacgtagatttggtgttttcacatagtcccatatttcttggaggctttgttcgtttctttttattcttttttctctaaatttcccttctcgcttcatttcattcatttcatcttccatcactgataccctttcttccagttgattgcatcggctcctgaggcttctgcattcttcacgtagttcttgagccttggctttcagctccatcagctcctttaagcacttctctgtattggttattctagttatacattcatctaaatttttttcgaagtttttaacttctttgcctttggtttgaatttcctcctgtagctcggagtagtttgattgtctgaacccttcttctctcaactcgtcaaagtcattctccgtccagctttgttccgttgctggtgaggaactatgttcctttggaggaggagaggcgctctgctttttagagtttccagtttttctgctcggtttttcccccatctttgtggttttatctacttttggtctttgatgatggtgatgtacagatgggtttttggtgtggatgtcctttctgtttgttagtttcccttctaacagacaggaccctcagctgcagatctgttggagtttgctagaggtccactccagaccctgtttgcctgggtaccagccgtggtggctgcataaacagcggattttcgtgaaccgcaaatgctgctgtctgatcgttcctctggaagttttgtctcagaggagtacctggtcgtgtgaggtgtcagtctacccctactggggggtgcctcccagttaggctgctcgggggtcaggggtcagggacccacttgaggaggccgtctgcccgttctcagatctccagctgcgtgctgggagaaccactgctctcctcaaagctgtcagacagggacatttaagtctgcagaggttactgctgtctttttgtttttgtgtgccctgcccccagaggtggagcctacagaggcaggcaggcctccttgagctgtggtgggctccacccagttggagcttcctggctgctttgtttacctaagcaagcctgggcaatggcgggctcccctccccagcctggctgccgccttgcagtttgatctcagactgctgtgctagcaatcagtgagactccgtgggcgtaggaccctctgagccaggtgcgggatataatctactgctgcgccgttttttaagcctgtcagaaaagcgcagaattagggtgggactgacccgattttccaggtgctgtctgtcacccctttctttgactaggaaagggaactccctgaccccttgtgcttcctgagtgaggcaatgcctcaccctgcttcggctcgcgcagggtgtgctgcacccactgtcctgcgcccactatctggcactccgcagtgagatgaacccagtacctcagatggaaatgcagaaatcacccgtcttctgcttcactcacactgggagctgtagaccggcgctgttcctattcggccatcttggctccgacctccctgtcagtcctaggttttaagagatgtggtctcactgagtcactgaggttggagtgtagtggtacaatcatagctccctgcagcctcaaactcctgagctcaagtggtcctcctacctcagcctcyttagtaactaggactgtaggcctrtgccaccgtgactggttaattttattattattattattattacttgagaaatggagcctcactgtgttacccaggctgctctcaaactcccagcctcaagcaatcttccctcctcagcctcctaaagcactgggattaaaggcatgaaccaccatgcctggcccattgccaggttttataaaaaaatatattgcagttgaatcatgatttttggcttcagtacctcgatgaatggtgaggtcatattctgacatggggaagaggartagaagcagtctgtgaatgtctaactttggtgtctaggaagacagttgtttccttactagagagagaacacacaatakggaaaaattaggggtaaagagagatgagtcaatatttggatataccaaattagttctccatggatctattgagtataagccctttggaattcgatttttcaaagctttttatcttgcaggtaaatgatttaatattcacagaatgtagtgacctactctatttacattgttttacatttcagacctagttttcgtgtctagttcttttgactcaggtggtcagtattctgttcattttaatatagttacctccctacttgacatacagattgacatattttgccataatagtaaatagtgcctaacatttattgaggattgttttatttcaggcattatgccaagccatttttactcttattaataatatttcattgataagtataattaaaatcatagtacctaatgttatcaaatacttacaacatgacttttcactgtcaagcaatttgcatatattatatactgtgcttttaataatcatcctattaggtagtggtgttattctcattttacagattggaaaatttacacttgaagaggttatgtaacttgcagagattacacagcttgttgggggcagagcaggatttaactccatagtagttgttgcactcaaccagtgcacattgctctcttcaaaacagtccttaagagggtgtgttggcttggtggaggagagggagtagactggagacagttgtgcttggaaactggaaatgtgacactgacagtctgtctggaggtcagggctaaactggctgatgatttagatgtcacacttatgtacattaagttgggaattgaaatcaygtgtttgggctctgtttatgagagagattagagatgaagagaagatgactacagtcagaatctgggtgccaaataataagattgagcaaccatgaaagtaggaggactatcaggagatttcagtgacaaagaatgcagtagagatgagagttttcaaaacaaagaagatggctaaattctctggtgttacaagaaaagcccattaggcttggtaactagcaggtcattggaggcctcttaggagcctagtttttaatcaaatggcagttgtagaaggcacaggaaatagggctcatgaatagatgctatttatatttggagagagattccactggagagggtaatcttgaagaatcatgaggtagataaactatgcaatgaagcctgatattggaagctatgggaaacaatagaatgtagacctctagaggaagagttaactgcacataggaagcactaaagaaaaagtgaaattaatgaagattagcaaaaaaacaggaataaagtgaaattgggaaaatctcatggataatctcagtactctcagccaagtgtatgtctaagtcatcagcatgattttgtgtgatatttttgccaaataccacacatatcctaagaatcaatttcctagaagataagattattaaaatttaaatccagctgccaaaaagataagctacctaaaagagaaacaaggccaaataaaactacccacctatatagatgcctgatagaaatgtaacctgtaatgttgtatcctaagtgagtgtaaggagacaggtggacttactgtatgtaaacttgtgaagtctaaattttctcttatatgtttgctcatcctatgtgcttatttttcttgctgatgatctttggttggattcttccaagtacacagtattcaccttcatgcaaaataagaacagattgtgtagtcagtttaaaaaaacagttaacacttatttagcactaattctgtttcaggtactgttctaatgtcttacacataatcacttattattctcacctgccatatgatttggatattatttttatgcacatgttgcagatgacgaaaatgaaatatagaatttacatattgttgatgtattagctgttggcattttgttataattaatttaaacaaaattatgataatcactttaaaactattaaccattaacttgacctttgtaaaggtaatctatctcagatctctttttttaatgagaatgtttaaatgagaataattatagaaaataactcttgtcattgtgaattgaattagatagtayatataaaaatctaaaaaagttttaagcacaagcaaatattgaatcagtgtgaattaataataataggtaaaacgtgggtttaaaacttgaagtctttatttctctgtgcactaatagaatgaactaacaaattccttgatcaaaagtaaaaatgtaaaaattctcatatttttttcagtttagaaagtgcaattatagcagatagatgcacaaagtaaaccaaattcaagacctagagagctaaaaggtgttctttttctctacaagctrtctacttcactgtgaaaataaagtgctaccttttgtaaaacacagtttttcaagcaagtagacaaatgttgcattggaaagtaaggctctatctgtgtccatatcaagtctattcttctggctcagaaagtaaaaacmaacaaaaagctatggtattttggaaggtggagtgtggtaaggtggcaaagggataagttggtgaaaggtttaggtgtacaaagtatgaaccagtttctctcaggcttatgttctttttgcctcaggaagctcattttgacatatcccctcacagactattacccatttccttctgagtgtgaagcagaaagccttccctttattaacttgcttccctgtaggctgttcctaactgaaatattgacatttatgtgttttacatgctctgatcacaataaatgctaatgttttatcaatatttaataattatgatagcagaactcatataatgtactcagatgccttcctcctgtatcatttctgtatctgataatgacataatgacattttcascaaataagtatataaaaattagtcttaatgcttgtacttatcccactstatgtaaaagttaaygtaacataatggattaagtgtttttcaattagaaaataatttttaaaacttatccttttttaaatgagcgtagcagtatcctaaacagtattatagaagtctaaaaaaaaagttaagacatcaaaaccctaacagtggtggaaagtcacttgaacagtgacaagaagagtccaatgagtcataaataagctaaattaattcagaagctgcagggtgctgcagagatgtggttggtaccttttgacctgtgaccaaaaaaaattcatttttttcttctatggtttatggagatagccttgtgggattcttatcaattgaagttacaatattcagtacttgaatataaacatggtggattagagtctgttagaaacagtgacttagataagcgtgttaatattttaggtcactagacaaccacctaattgaatagtataaaacaatttgtgtctttgtccagggagtaagaaaccatggaaattattcacatatgtcacaactccaagattatttttattcctgtgtttgtttcagtttatcatgtttttacacattttgaaagaagagatgcatataattattttcaacttttttgtcacttattttagcattattttatttacattcaaataaaataatctttaaatttatgctttcttatacatatatgtttatgtttttctgacattgttagtttatgatgctaaatttaagcattgcattgttaaaggcaggtaaatatgacagagtgcttttaatgtaataagtggggataataaatgtttcgtaatacctatattggcagtggagcagatagcttatgtagaaatagaacgccattcttaaataggtcagaattagctctttaggccttgaatttggtttactttgtgcatctatgtgctataaattcacattacaaactgaagaaagtatgggaatttttacatttttacttttgatcacgaaatttgttagtttattctgttagtgtagagagaaaaaagactactttgagttataaacccacattttttacctattattattaattcacactgattcactatttgatttgtgcttaaaacatttttagatttttttacatgtagtatctaatttaattcacaacaatgacaagaggtattttctattgttattctcatttaaaaataagagatctgagataggagattaactttacaaaggtcactaagatgtcaaggaaatgaggtgtagattattataaatgctctaactttttccagatttgctccccaaagaaggttggaagtactacattaatgacattgtaccagctgactttctagatttgtagtaataaagtgggaatgaagtggggttgggaggagtgtattcactaaaaataccttctttgttggctttggcatactgaaaagagaaacatttcttttgagataaattttctagccatttctgctagatacctccttttggcaagtgttgaatttggatgcactctgtttcagtttttatagctgggtgtttgctgctgtcttgggtcatgtttgtcaggggttgacaagcactttaggatgttgtgcagcttcaggcaacagcaggctccctggaaatcatgactgcttcttttaacctcatagttctcaaaattccgtggcttatgagaacctacatgaaagcctgccatgtcacacatttaataagggttttttttcaaatcattaaggaaaataatagctacaatttcctacattcttaaggtttttttttttttcttcaaattttggcttctactgttacttgtctatcgcagaattgattttagatgwtacatttatattttagaacaaaatttatttttagttatttaagatatgaagataatcgcaaacattttaaagtttaaggaatagtaattttttctttaactgctgttggacaaaaaagaatctgtacttgtgttgctgggcttttgagatcttttttgatagtcaggataatatataggtatgctgaagtagcacagatagtagattgagttacataagaaaggacacacagctaactgaatatttttaaaggtggattaaaaagaatagatccataaaaagaatctaaagtagcagatccagaaataaagcgaagaggaaaattagagttgtctagacttcctacagaaagggagagaaaagagaaattgtgaagcagctactgtgttgaatgagactttgtctaaagagtgtgttttggatattttggtcattgttatatagaaatctgtatatagtgagcacccacccatacccatagactactctccccaaatacactttgctaccttttgacaaaacttgaatgtttttgaattttttttgaatcttttagacttggattggtgttctgtggatatgatagcatacagaaatgggccagaaggcaggataatgaggaacaaaggagtattgatggtggtttttaccaaatcaaaaagacatatagatatttcatgatttgaacttgttgaaaatcactgatgacatttctatctttttctggattctaatcctaaactcttaaggctgaacctgtgatctacttggcattgtttttgaagacctagaattttaaccttagtgtaatgcttatgcttcattagttgatagaagcttctctgataccagttgtgccaaatattaagtttcactatacacaatagctggtgttatgcctgtcattggaagtaaatgaaggactgtgtgctttaaatattactaaaactgttctaaatcctctaaagaataggaaaacaattgattcatgttcttcaaaaggattttaatgtaactgctgatttggtgatgagcatacccaaaatgtttagtttggggaatgtggtgtcaattggaattcttgaaactacactagtattatcctattactgagtcattcctttgagggtggcttagaattaaaccatcttggaaaggagaagacattatatcctctttcatttatttgttcaacaaacattaaattgttactcttattgggcagtgtgttagttttcatagatacaacaataaataagaactctctttgacttcatggattatattatctattggaaaagacagatgtgtaaatagattataattacatgtttctgtgataatggtatacacatgtcatacatactaagaaggaagcataggacaataatctgagagttgttttaacctaaaaagactaattgtcacagggaggaaatctgcatggtgagaattgatggggttgaaaattttgcagtgaagtatgaggcaagctgtgtttaaaaagcagaaatgtaatatggaaggtgagatgataaaccaggaatgagtgaaaccagaggatcattacttcagtaataaaatctctagggaaaactaggttaaagctggggatgttgtcttctggaatttaagaatagaagttaatgtatgagttcacatrtataactcatattccaactatagacggtccctaacttaagatggtttcacttaacaatatttcgactttatgatggtgcgaaagtgatacgaactgagtagaaaccatactttgaacacccacacaaccattgttttccactttcagtacagtatttaataaattgcatgagctattcaaacgttactataaaagaggctttgtgttaggtaattttgtctaactgtaggctaatgagcatgtttaggtgtgcttggctaagctctatggatgttaggttaaaggttgtatatatcaaatgcatttccaacttagatattttcaacttaatggtgagtttatcagggcacaacccaatcataaggagcatactttagtgttgtgtaatagcaacactaaaatagtgacatagagtaaaaaagtaggtacatggtcttagataagacagtataccatatacttgacataattttttttggaaatagcaccctcaaggaggtattttgtttatattattaaaagcttatagcatttaaaaattaattaaggggagaataattatcagatttttactctttagctaatgtcattcgtataataaaatgcctatataagtttaaggagtataattcaattaagccttctttctgtggttttgaaaataatttttacaatgataatcagctgcagcaaaaacagatctaaggcaaaaataccaaattgtattagaatagtcaaatttcagatatttttattgcaaatgttaaaagagtttcaaatatcagctttaaaaacttatgtaaaagctcattgtatactaatgtgatttaaataatatataattaacctacataggttgtgtaattaatttaccagtatttaaataatttaggatgataatattctagaactgaggctgtgtctttttttagtttcttttaaaatatcatatttttaattcttgagataattgcttgttggaagtatcaatttagtgaaattctttaatcaagcgtaagtttatgttatatcatcttcttatgtgtattgtttattataattgattgtaacataagtgacttcaccttgcattagccagataaaataaaattcagcaatgtaattttggatttccacatttctatgttaaagtacttaaaaactcaaactcaagaagttacaaaggtgttaaatattaaagtatcaagaaattagcaatttaaaaatatctgtgtctcattttaagcatatagttacatcctaaatatatttttcatttacaactgttagaaatgagttaattttaaggatactactaccagggtaaaaatayagattgaatttaagaaatttataagaatattgtcaataaagttgtacattttcattctatccatggctaaagaaagattatccacacamtcatacgtagtcattaatacagaaagatgggaaagatggtttgggacaattttatttgttttattattattttttattatactttaagttttagggtacatgtgcacaatgtgcaggtttgttacatatgtatacatgtgccatgttggtgcgccgcacccagtaactcgtcatttaacwttaggtatatctcctaatgctatccctcccccgtccccccaccccacaacaggccccggtgtgtgatgttccccttcctgtgtccatgtgttctcattgttcagttcccacctatgagtgagaacatgcagtgtttggttttttgtccttgtgatagtttgctgagaatgatggtttccagcttcatccatgtccctacaaaggacatgaactcatccttttttatggctgcatagtattccatggtgtatatgtgccacattttcttaatccagtctatcattgttggacatttgggttggttccaagtctttgctattgtgaatggtgccacgataaacatacgtgtgcatgtgtctttatagcagcatgatttataatcctttgggtatctacccagtaatgggatggctgggtcaaatggtatttctagttctagatccctgaggaatcgccacactgacttccacaatggttgaactagtttacagttccaccaaaagtgtaaaagtgttcctatttctccatatcctttccagcacctgttgtttcctgactttttaatgatcgccattctaactggtgtgagatgatatctcattgtggttttgatttgcatttctctgatggccagtgatgatgagcattatttcatgtgtcttttggctgcataaatgtcttcttttgagaagtgtctgttcatatcctttgcccactttttgatggggttgtttgtttttttcttgtaaatttgtttgagttcattgtagattctggatattagccctttgtcagatgagtagattgaaaaaattttctcccattctgtaggttgcctgttcactctgatggtagtttcttttgcagtgcagaagctctttagtttaattagatcccatttgtccattttagcttttgttaccattgcttttggtgttttagacatgaagtccttgcccatgcctatgtcctgaatggtactgcctaggttttcttctagggtttttatggttttaggtctaacattgaagtctttaatccaccttgacttaatttttgtataaggtgtaaggaaggcatccagtttcagctttctacatatggctagccagttttcccagcaccatttattaaatagggaatcctttccccatttcttgtttttgtcaggtttgtcaaagatcagatggttgtaggtatgtggcattatttctgagggctccattctgttgcattgatctatatctctgttttggtaccagtaccatgctattttggttactgtagccttgtagtatagtttgaagtcaggtagcgtgatgcctccagctttattcttttggcttaggattgacgtggtgatgcgggctcttttttggttccatatgaactttaaagtagtttttttgaattctgtgaagaaagtcattggtagcttgatggggatggcactgaatctgtaaattaccttgggcagtatggccatgttcacgatattgattcttcctacccatgagcatggaatgttcttccatttgtttgtgtcctcttttatttcattgagcagtggtttgtagttctccttgaagaggtccttcacatcccttgtaagttggactcctaggtattttattctctttgaagcaattgtgaatgggagttcactcatgatttggctctctgtttgtctgttattggtgtataggaatgcttatgatttttgcacattgattttatatcctgagactttgctgaagttgcctatcagcttaaggagattttgggctgagacgatggggttttctaggtatacaatcatgtcatctgcaaacagggacaatttgacttcctcttttcctaactgaataccctttatttccttctcctgcctaattgccctggccagaacttccaacactatgttgaataggagtggtgagagagggcatccctgtcttggaccatttgaaatgagatatgagaaaaccaatttactctcagaaagaaatagaatatcatttgaaaacttgtgaaactgctataaaccatcatgttactgaaatgcattcattttaaaggtctctctgtaccacaaaaacggttttattgtggagcatatgaacagcttcttccattctcactacatgcttaatgtttcttgttcctcattagttagcctttgtctacattctttaattgtggatttctatgggtgttaatcactgggttacacatgtacttatctagtgtccctctcacgttttattcttagttctaggcataaaccttttcatgccattttccaggcttaggcttctatgataatacacgtatcctggacctccttccctttcttcttttccccatcctcccttttctatctgtccttaggtgttcttatgtcacctagatagataattcctctagcctccactctggttcagatcttctgatttccttattcatttattggtttctctaaaagtttccaaatgttcttaaagtcccagcatcttgactcctatgcaatcatctacccattatatacacactactgaaatatatctattaccaggcaaaggtggccagaacgtctcttgaaggcagatagtatatctacaaataatttgcctcatgctattgtttctatcttagaaattagatttctatagaaatggtacttgggcatccaaacagattcaacaccttcttttatatcacagataatatgtatattgtttttactgtttttgttaaaggaaccttgaaatatcttttaattctcgaacactttacctacctaacagctaacctttttttttttttactgtattttaccctttgcctagcaataaactcaacaatttaaaaatatttctgatttattctaattatatttttcaccagttaaccatcgccccctagccactctccactacccttcccagtctctggtaaccattctgctactctctatcttcatgagttcatttttttttagcacccacaaatagatgagaacatatgmaatttatctttctgtgcctggcttatttcatttaacataatgacctctagttccgtccatgtttttgcaaatgacaggatctcattcttttttatggctgaatagtattccattgtatatatgtactatattttctttattcatcttttgatggacatttagtttgcttacaaatcttgtctattgtgaatagtactgcaataaacatgggagtgcagatatctctttgacatactgatttcctttcttctgagtatgtagctagcagtgggattgctggatcatatggtagctcaatttctagtatttgatagcacaacagtgtgattatagtcaataataatttattatacatttaaaaacaactgaaagaatataattagattgtaactcaaagacaggataaatgcttgaggtgatggataccgaattgcctctattgtgacttttatgcatttatgcctgtttcaaaagatctcatgtaccccataaatatatacacttaatatgtatccccaaaaattaaaaattaaaaaaaagtcttgtgggcagaaatgtaaaaaaaaaataaaatacaggaatatattttaaaaatttatttgcatcaatttaaaggacacaagtgtaaaaaatttatactaagagaattttcagtgtcctttgagggtttgtcaaactaaaatcttaaaaatgttattaagacgttcctacttaaatctaacctaaatatttattgtgccaaactgcccacatgaaaacagaataaatatttgtgatgtaaagtaaccatttactactattaaatcttgtctcagctttgtttttgcctattatatatcatttacttaaaaaccttttaatcacaccctgattaatttggattggtttttgtaatctgacagtgtaacttccaaataataaagatgttttaagttaaaaacactttagaagtttttcttcacttagaaacacattccactgtgtaagtcccttgaagtcagttataattattacagtctgtggggattagtatattgtaaggagattactgggcttctttacttagcagcacaatgagcaacggtgtaccctgagcacacagagcggtaaacattggaattgtacagttaaaagagttctgcataaacatgctatgttccagcacccacttaaaaagaaatcagcctgaaaccaataaatttctgttgagtactactctgtatatattatttgctataagggctagaaagtaaagaaatataagacatgatttccaggctcaagaatactgcagttgtttacgaggaagggctgtgttcctgttgtaaacatttcatacaataatcttattcatatcactatttttataacacagggaaagaaattgagaatcagagaagtcagataattgcccaggttctgtaggtgggaagtgtaagagttggaattcaaatttttctctctgggtgaaaaggccatgctctttgctcatgtcaaatccgctggatggaaaagatgatcacacatgcagtaacactgaacacttacgtgatgatgacttccattgtgagtattgtctatagttactctagaaaaactcagagattgttaaagtaacctataaatgcttcatagaggagttaagaattgagttgtattttgaatcagaataggataaagatatacccagagaaagttgaaataaaagagcaggagttagtgcaaaggcatgcaaatagaaatagtatgtatatttcaaatgtggaagaaaataaattttgtcagtttaccgtagaaagattcttttagtaatagcttggaaataagactagataaggcataattgtatragctacactgattgatcatgtactagttattgatattggtaagtaatttaaatatactaattcatttaatctgaataacaaccatatcagaagtatagtataattaatttcattttattatgcagaaatggattgtgcagagagagtaaacagcttttcccaagattttacaactagtaagtggaaaattgaattcaaattcaggtattctagctctagatcctgtactcttaaccactatactatccattcctctgggaaaatgagacaatattgcatgcaaccttgaaagtcatgcgtactagctacgtttgaaatagtaaaatgaaatagtgacctaggattgaaacaatatgtgtgcctggtggtatggctggagttaggtagtggttggtgtgcagtaggactggagagtaggattgtaaaatctgcaataatttgtgattgattttaaatattaaggtgaggtaaatgttaaaaattttatggagttttagattctggtgattgggatagtgctagtatcaattacagatagataagaccctatttggcagggaaagtggcgatttcagttttttcatgctgaacttgagccaactgtgatacatcaagatgttgatacccagaagatgtatcttagaatacaggacagacaatctgctgaggatcacagaaattaagatatcaatttaaaagtaatacagtrtagtaaatttaataattatttgagtgtaaaatattgctgaagaagtgctaccaaaagtgagtttcatgggccattgtggtccacgaattgtttctggttagaattaagagtaattcatgtttgttatatgaaagtattgatctgcaattgtgttttttttcaaaaaaaaaatgattcttcaggataaatatttcaagaagcattgttctaaatggttacattcctttgctgtaatgaccagacagtatcaaggtctcccaaacaaattgaggcattttccagcatttcaggattaagctcaattgaattgactttattcacttttgtctccttcagcaccacctcccagataagtaggagcctgggtcagtgatcttgtcctagagtctcagacaagtactaggacagagcattactttcctgtaatatgtgattaaggtgagcaatccaagaggcggaatcctgtaatgaaatcaaagtcagttcagacaaaccatctatctcactatcatcaatccagaaatgctaggcacaagtttaagggttaaaagtgaagaataagaaaacaatcattttctcctggcttgagaaaacatttaaggtcatcttcataggtcacttaagagtggctggctgtgatcagttatggattatttaggagcattgattggacttgtataattatagcctggcagacatcacatctgattaactcagccttaccatggagatgacttagtttatattttttaaattgtacctgtaccatttcagtacttcctgagaattctcagcctattttgtaggatttattttcttcttatccaagtcagaaacaatctacctacatgattaaactatgtcccttggtcagtgaaactgataggtttgttaaatacataaaatcactttaattttgagtaagaaggcaagaagaggtgggtacagagaatgtcttctaataaggaattattattagaaggattatgatctgagatgcctaaaaagtcaaaaactctgaagtataaggaatataaatataacaagaaaaatctgtatataccaggagtttacaactagtttaaagtgtaaagcatacaaaaagtttataattaaaaatataarcaaatgccatttatttgatggagtaacagggatcagatctgaccttccactgtaaacagcaaaacatgaacaaaatatataaagctctaatttttaaggcactggaacactggaatcagccaacaaagaacaatggatcgtaaaaattggagaataaatgaagtaagccttatgattttctcaggttagtgccttgagagtttctatgtctcaatgcacagatggaaactcaggtgaaccctggtggattctctgtaatgaggagacagagctgagagtttggcaagactacagcagcaagaaattgcaatacagagtaccgaggaaggaagagctgcactcgaagaatgctgacatgtgcagaggatcccctttaggtattctgctgaatactaagtagcacatgtatgtgaggaaactacctgaggcctgaaaaagaaatttctaaaatgagtagaggtgacaagtgactcacacagggctagaaatagtacctattcccacaagtggcaaacctattagagaagttacaattaaaaagattgattgtatcaagtgtcgagaatgtggagcaactggaatcctcatacactgctggtgggaatgtaaaatggtgcaagcactttggaatgcaacttttcaggttcttaaaaagccagacatgtaccttctacctatgacctagctattccaaacacaggtatttacccaagataagtgaaagcatgtatttatccaaagactcagacatttgtattcatagcagttttatttgtaagagccagaaactggtaacaaaccgagtgcccatcaacaggtggatgggtaaataaactgtggtatgtccacaatggaataatactaaatgatataaggaaatgagccactgatacaggctacaacatgggtgaatgtcaaactagttatgctgagtgaaaggggctagatgaaattacttcataatgtattcaatttttatacaattctagaaaatgcaactaatttatgatgatagaaagccaatcagtggttccatgaagaaggggtaagatgtatgctggccggaaaagatgggaaggagaaattaaataaagaattgagaaacctttagagttgataggtatgttcattttcttgattgtggtgatggtttcacaggtgcctatacagattggctatccctaatccaataatccagaataagaaatactccaaaatccaaaactttttgagcgccgatctgacacacaataaaagtttattggcacattttgaattttggatttttggattataccaggaagtagaatgcaaatattaaaaaatctgaaatattccaaaatccaaaataccttttatcccaaatattttggataatgcattctcaacctgtatatgtaaaatcttatcagttaccatttacaatttttaaaagtacagcttattgtaggtcagttatctgtcaagaatttaaaaatgaatatgagtgaatgatacttgcgaagtgaaggatagatatagtaagtgcagtagctactcaraagagtgtgagagagaaatagagaattaggaatcatgttcagttaagaaaatgtatataaacaaaatgggagatatattagagcttaacagtaaacatttagacaggttgatgtaagatgaatggaggtgggtatggtatcaatagagtcatcaaggggaaaaattgtaggattttcataaaatgaaaaagctgtgatcttaaatagagtgatctcaagttttggaaaggggtggacaagagggcatgatagttgggaacttttaaatgacaggttaagacgtcttggcagtatctgtggagtaaggatgcttaatggtcagaatagatgagtgacaagctctgtgtgaaggagcttgatgccagaagagcagagagcaccaaacagtcttcagaagcactcaggtcaagtgaattcaggaaaaagagttataaacgttgaaaacaattagtcatcatagtatcagacaggctaatttgtagaagagctttagacacaggatacagtttttgcaacttccgcagagaaggcctggagaagaggaggaatgaaaggacagaccatggcttgtcaatgagatgttgttttctgaaataaacatagtgaataggtctctactggaaacagtattgaacatacccacttattaagaggccttctaacaaagtgcacagagaaaagaatcccctgttgaggttgctgatttcctatgagggatatttttggagagcaaatttggtctgatactgatactttttttttcccataagagttgtcttacttttggaccacctgtcgatatccagaaactctgaagattcccrgaaccattccaagtattattgatagtgtgataggtccaaaattttgacattttaaaacttcagaacgaggagcattttggagaccttaaattcaggagggaccttctaggaggcctgcatttttccttttgtgttttagaggaaaccaggaaattctgaagagtataataaatcaatatgtagtttagacatctgtgttattctctgggtacagattagttaggctgttgcaagtcatattcccctatttcacattagaacaacctgctgttggtacatgagttagcattacactatgagcaaaacatgagcagaggaattgcaaagttgtattggtccttgaagcaatgaatcagagctaaagtgacagactttaccagcagcatattaaaaaatgccctcttgtaaaatttaccatgattattttcagacaaactgtgcatccaggacacatggatgatgacaagatcatgaacattatctctgaatatgaaaggcatgatgtgcgcaactatcaaagtgcagttcattttagaataagtggtattttcatgtagttgcagggcaagacaggaaaaaatagtttataaagggaatgaagttgtggatctctgacagctgatcttttcaatctatgtgaaaataccagttgtagcagcaatggcaacaaaaactactgatttctctttttatttgaaagattccttagacactttaagcggttttaccataggataaatggactatgctttctgcttcatcttcaggtctccaattaggggtgggttgcccctgtttgaggagtcagtatgtggggaatactattgatggcgtacacttagagactgaccttctgaataccttgtaggtcttatcaaagtagtcactgaaattcatccattttataatttttcttatgtttctttttgcatgaacctcctcaagtcatcacccactgccccagaaaaaatcactctgatgttggaggctaaattcatcattgcatttgtaagcctagaatcaagggagttattactgcttttcttcacaagactagctctttcatatgcgttttccgtgtatacaaaatgcctaaaccatttaagcagtatctcatagcaagtgacaaaatatgttctgtttgaagcacgatgcacagctctggttgttttgggcctgctttatttacatgttcagagtaagcctggcaaatacaggttgaatgtccctaatctgaaatccaaagtgctccaaaatccaaaattttgagtgcccacatgatactcagagaagtatttcagattttggattttcagatgctcaaccagaaagtatattggaaatattcaaaaatccgaaatccaaaacatttctggtctcaagcattttggataagggatacacaacctaggcattgcattgattgcctaaatggaaatctggagctattaaaatttttggaatgcattagtttactttgaaagtaaaaattgttgtagtgtgctcaagcctaaactgcagcaaattaatataatcaaatgaatttagagcataaacaaagtattcctaggatttttcagagttggaatttcatggttgcttttggctttaaaatgaagcttattgaaattatagtaaaaatacagtaacagggaaaaattwaacagttttggtaaatggaaacaatttgtctctgatataatttttttttctatttctgttactctctcccatttttagggcagtattttaaccacatacttttatattggcttttttttgaaagatcaaatatttgatgttaatttttgtttgaagttgtgaaggctttgctggaaaactcgaagttccaaatgtgacatttattatattattatgtgcccttactagggaaaattgaatataaataagtgttaatgagcgtgctggttgtcttataaggaataattcattagaattcggtatatgagaaaagcaggtggggagatgataaaccataccacatgaatatgctggacttttgaaatgacaacaatagtaagggaacaatagtacattcttgaaagataattgtaattctttcaaggctcatgaactgatcattttgctcctaaggcgagaagtttgtggtgattaaattatggacatataaagcatgttcatatttttcaataaaattctatatgatatgctccgcaaatgtggaattgttttggtggatgaataaatattaatctttggaagtggctaaataaacattgaatgtccaaggtgatttttttcaccatttatcctaaaggagaaacttacgcatacatatatgcacaaaaacacacaccatacatcctcagggagattgttttttggtttctggagatcatcagacttctggtgatgctggtgtaggaagtgattctagttagttttatatagctgttgctttatattgtaaataaaatagtactctgggacactggaggaacaattagatcaagtaaaatcagttttctttggtcgaagaaaataattgagtgaaagctcttgatattgtgtgtttaagaaggaaaatgtaaagttaaagaagaagaaaatggatatagcccagagataacctaaggataggatatggaatacataggtaatatggcaggaatggagagttatctaactgcatgtcctcatgtctccaacatgtgcaagatattttccgaagtataatttttttttaatttattttttagagacagggtctcactctctgtagcctaggctggagtgcagtggtataatcctagctcacctcaaactcctgggatcctcctgcctcagtctctagagtagctataggattatagttgtgcaccaccatgcccagctaatttgaaaataaattttgtacagagagggtcttgctgttttgcccaggctggtctcaaacttctggcctcaagagatcctctcaatttggcctcccaaagccttgggattacaggcgtgagccatcactaaaaatattttaacagtttcctcgagtggttctagttgtggatgtccagtaacttaacttgtttttacacaatctgatgcttttattagaaagtatttcctgaatgcttaacataatttccctttactcaattaaactgtaccatttctagctggtgtaattacaaacatacttaagaacctttcatggttttgtttctatgcggatttggaactttcatggttttgtgcctatggcctctttaaaaaatataggacatatctaaaatgaataagcaataagtaaggaaagttgaagcactcctaatgtatgataggacagaaaagacaaagattaaaaaatagactaaattttcttatggctataaacctttttcctataaacgtatttgattttgtaaaacagggaagttgttggagtttgatgtatgtattgcttatgtagttatatatatatatatatatwtaaattatattttgcttttgttatgtttagtggagaaacgataactaaagataatttttaggcattttttaagacttctaactgcagacagttttttagagttggaacaaactttctgaagtatcataaagcaactcttgaaattaagagtaaagagataattgatggccagatgcggtgcctcacgcccataatcccagcactttgggatgccaaggtgcgtggagtgctagaggtcaggagttcgagaccagactggccaacatggtgaaaccgcgtctctactaaaaatacaaaaattagccaggcctggtggcaggcacccatggtcccagctactcgggaggctgaggcaggagaatcgcttgaacctgggaagcagaggttgtagtgagctaagattttaccactgcactccagcctgggtgacagagcaagactctgtctcaaaaaaaaaaaatttgtttatctcctgtctaaaactcttccctctgtgacttcattattatggatgagccaccttcttaaaaatcctattttgaatcacagaattagcatattctctcagtcatctaccctctcaccatcttatgaataagtatcactcctgttaaggcttgaaaaactgagacagggaatacctgtatatagatattcagtaaatatttcatggcttcgacaacaaataacacttcaaaatgaacatcataatgtaaaaggcatgttgttgctaagactataggttgagtactagactatacgagtttgaataattgctctactgtttactagctagatatgcttatgcaagttatttagactctttctgtctcaatttctttatatatatatataatgagcataacagtaatctttacttcatgtgttgttgtgaaggtcaaatgagctgatacattcaaaacatttagaaaacttcctggtgcaatagaaaaactacctgtttgggtactgtgcccattacttgggttacaaaatgatctgtacaccaaaccagtggcacacacaatttacccatggagcaaacctgtgcatgtaccccctgcaactaaaatagaaattggaagaaaaaaaaggaatttccttgtacaaagtaagcatttgataataatcagctagtggtcatagtaattttaattcatataaaatgtcagttttgttgtcaagggaaaaattttcacaatatgatatacaaaagttaatgcaaaagtaatgaacttttggtacatgctacaacatggatggacttgacatgcgaatggaagtaagccagacaaaaaggcatcagtatttctcatctccctttttgcttttacttcccatttgcaacccatctcaagrgaggacaatggaaggaaaggggtaaaaataatatttaagaaagaaacaggagaaaaagtaaaagaaaaagcaaaatagtgagacagaggaacagttgcaggggtcgttaatatgcattttccatggttccaagaggctcctcaattttattttccctgattgaaacttcaaagaacaactttttgattaaaaaattaaatttcccagtaattgccagcctgaacaagatgtgaattggcagacccagtggtagcttctagatttactgacaaaagaaatattctgggctggtagagcagacactcagctggtgagtcagctgactgaggtgcctttatctgtctttctctactttgcccagtcctctgagagtgtgagacagccacagcccataaaagaagtcatttggtaaacatctaagggttggatttagaaaaaatggaggatggtttgggtcataggatttgggatacagtaagaggtcataaaggcaataactggttagttgtacgtagaggctgtgggcacagttaatttgtgtggaggaaaagaagaatgatttgatgctcagatgtttttgagaaaaaggtttttatattaatgttggaaaaaaccctaaagataactttaattatgtactacaaataaattgtttttaactttatattttttcttaaatttagggtgaaattgaattgcttttgtctaattattatgaaatatgacttcttatactttggaaaataagagttatggttttgaaacactagaatacagttgtttttgatttgactcattttatttgacctaaaaaatagaaattaggttatgtatgattatgatgaatggaattttctaggaagcaaaattggttcaatcagagcaattattgtttttcattgttgttagcccagaagcagtaggaccagtctttgtgttattctttaccgatgtctctctagatattatagtcaatttgctttattcagtggtgaaggaagcattacaggatatgttgttatattatcagagagttacatgtggataatggtaacagccacagtgtctgaggctaatttttcaggaaaagaattgactaattattaaagcttttcttatttaggcaattgcagataattttgtatcattgaataatttttagtaaaagtagttcccctctattttggaaaggaaaatttaaggaaacaatagaagctcagaggaaagattgacttttgaaaaagtaaatattacacctaacactttgatgaaatgtacacctaactaatacctttatccagaaggaaaattgcatttgtctctgacacttgaatggaagaacagtttaaaaaatggtttaataaagggtattacctttatttttttactgatatttgctttaataaaattatatttaattaaattatattagattttaaattgtttttgaaatgaaggacatccatttgtaattacacacaaaaatattttttattttctcttttatctcagttttatctcctcaattttctcaattggtataatggtataaggagaaacataaattatgatttttctgtaattattctgaaatagaaaacttctgaaaaattggtagaccttgaggaaatatttaaatgatgccatctaaagatgatgctgagtaaaatattcattattctttataaacaaaattacagagtagatgaaatttgtcttaattcccttgttagctttcctcccattcatataattcctatcaccctatgacctccaaacacacacacacacaaccctgtatccggttttaaccatcttgcaggggtaataactaattccttactaccagtgaaacctgataaaggtttaggtacaaagtctataatggtttatttgcattttataaaaggagaagggtggggaggttggcagatgagattggaatcataacaacttagtgaagttacctctgggtggagtccttttgatattgcttactttccctacgaagggctatcagtgctgctctcccacagtgcacacacacatgcatgcacacacacactcgtgcaagaatgcatgtgatagtggaacaaataatgaacaatgaactatgttataataactctgaaaaggtactcactcagctatagtctgacttgagctttttctctgactagattttttacctcaaaggcagttgtacagacaacactagtaatcattgtaaattaaattctttctattgtcacaatctggcagtgttaaggacaatttcagttcactgcagaaaatatatttgaaggatattttcccaaatatttgagtgaacttcctttttagagtaattatttgttaatttgagaagtttcatttagattttatctatacaataagttgtcagctaaaggtggacaaataaataaataataccataaaattttagatgtatgttgcttgtgcccccctctacaaagagaaaacagtattatgagaaatatcataaagcatatcaaaatggaaatatctccccagtgactgctgtgtgcttgaagtatctagcactagtctagaaatagcacctaggggaggagattctgttaaattgtgaatatatgtcttgaaacctgtaagacattttgccatggctmgaaagtgacaagtttgtgcctagtttattattacattagttgattgtcatgttacagagtagacaacacaatactgaggtaaaaagaaatagacaagaaggctctcatttgaagcaaaacacagtactggccaatcccatagcatcttgatctgtcagcagcccctgttgggagttggcagaaagatttgcaccaaagagtaagtttctaagtgacaccaaaatgttcggtggggatggctgaagatctgactgacttcttaaaatttttctttagagagttgtacctaggtgtccattaaaaaatattgctggagcatggagggtagggaagctgatagtagaacctcagacaaatgatattttgaagagacagtgcaacagactgaacatgtagcagtattttattgaaaggttttattaatcgaataaaaatgagagcatgctacattttaaacatacaactcaaattaactgctagaaaagtgaaaacttggtgcaattgttctgaacttaaccaggtaaagtgtttgctcagcctgcagatggtgtgaaacacttggcatagtttctggactcctggggtgagaagtgtgaactctgaaacaaggaatggcaatgtggtgatgatcttagtggagacaatgtgagggcagagaggggagaacaggaaatgcaactttccatacctaaaggaatagtgtgctttacctgccagcctgaaatgacagtgactgctgcagttctagattttctacatagttggatacaaaagaaaggaacaattcctgcctctgtgccaaaacttccatattccttagggttttgacaagaatttggattaccttgacctagggaataggagtgaggataatcaccatccgtctctagcccatgtgaggacagtattcccatcagtgtcactcgctgttgtatctgagagtcagcagtattgagtgaaggaacgacctgaagagagcatgagaaggtacattcacaccttcacaatatgtgcggattagggatctacaatctttggtgaggagaaactgctttttatttccctggacctttatttcaacctgcattcattcaacagatgccttctgaggacctcctacatattattgactgatttgtttctctggcagcctactattatagagataaaagttgtcatcactcatgggaggtaaaagaatgaacatggcctcctccctagttgagtacttgaaaggcagacatgagaaacatgattaaatgaataatttttaaatgttgattttcaatattgatctttgaaaaagaagtcaaatgtacaatatggatacgtgatgaacagaggagtaagtctgccttgtgattagggaaagcatctcatttgagacctaaagaaggtaccagtgctgataataaagtaataaggaggaagtgctgacataaaacatatgccactgttatctgtatgcccttccattctgaaagacaagagggatggagatgaataatgtccccagtcctcaagcaaaatattagtcttgtttaatggattatacttgaatacagtatataaatctctctactgaaaatgtctacaatgaaatgattttgacaattgaatatgtaattaaatttaaaatatttatctgtgctttctacaacaatttcaaggaagtgaggcattattatcaatggaagatattttgttttcacaaaggattactacatccctcattagagaccaatctaacacagataacatggtacttttttgatggcaggtgttcagtgcgttcactgaattgaattgcaattcatattgtgccacattaggttcctcacaattaagcattttcatgttgagttacaaaattgcctactttcagggaataatgtattcaacagctctcaactatcttgcattgtctaggagtggaacagaacaataaatcttggatcttgatcaccaagaaataatctggttaggatgctgtctttgggcagttctactttagatatgaggcagccaaagagttaagagacttgctctaggtcccaggcacattacatatttttatgtgtcccttctctcataaaataaaagtgcttactgccaccctcaagagatatgtgtcaggttcttatactcctgtgggataaggttaaatcatttcaataggtcttgcaggaaatcagtggcacagctgtttataaaacctaagatgtttaaccctgggtgactttttgaaccctgctcttagtatcaaaagcaaatactgtgattcattttcatctacatcagtgtctgtctgaagccttaaagagagaaaaggtgtcactgatcataacatatgaattagaaaccataaatgagtaaactgcttctcagtacagagaacaaagtacttatcatttaccaatatgatgatattgtataacgaaatgtatacttacaactatcattaggaaatccccattttaaatattccttgaggccttaatagaaatgtgatttcttaacaggtacctcctttagcctatgaatctctaatttgtctttaggttagaatataggtaaaaactgtaaagtgtacctttttccttttctatttttttgtttgttttttgctcctctctttctctgtgctttgtgtccataaactgtcactttgctgcctgtgatttcctggtttttcccccccatggtgtagtgtaaccaaggcctcttttgtgttgcaccctaataaagtgtacaagttgagcatctaccctttcttggtatctttttctgcatcgtttttccctttcatctttgctgtgataatctgataaattaatattctttacagttttaatgactgctaatagattaatgcatcttaatgactgttaatggcttaatgtgctgcacctcctgggtaaaatgtttgcattttaaaagggctttttagaatcctaaccttatttaaagacatgactctgtgagtatccaaaacctgttgacaaatcacttaggagaaataccatgttagatttttttttcacattttaacatctctgagaacaagaatgcattcttaaaattggtgtgattaaaaaacactgcatcatagattggaggcattttttatttcattcttagtgatgcataaaataatcatatgtcttaaaatcaatgacattgtagatttgataaaatacagtagctattttttttttttttttttggccaccgttgaaatcataccttgtggtagatggtaattacctcccttatcggatttcactcacacacacacacaaactcaattctgtatccactaaacactcataaacatatcctggcaccatcgaaccatgacattctctaattggctgctgtggaagctacaattaaaattttagggtttttttgagccacagcgaagaatgctttctaaacttggcttaagacatttgtaagaaatctgcactggaaatgacattctatttataacatctatttgctattttaaaaaatgtcatttataatactttggttcctcttattctgtctcactttgctttgagggagagaatgataaatatgagtaaacaccacagatgaatatagtgtcttgaaggactggtgatatttttaaagatgaaaaggctttgtatctgtaattactgatcatgtgatacacaatttcaaataaaagagttaatttcgtcctttctttttggaagacattagaaacagttgcagaagaaaaagcaagctcatcaacaacaaaaaaacagtcagaaaattggctaaaattcagctctttgtgctcttgagactgaaaaccatggctgaaagaaagcttttcaatttcctaccacgtatattcattgcctccttttagattggtttacttttttgaagcagttaagtagtagtatttcttggcaaaagaaacgtgtttaaacaattctttaaattctgttacttattcttcccactttccactcttctccattgctcatcccataccaccaacttcacattcctgcttgggttatgaggtatgggcactaatgtatattcctctagggtatcttttaattttatttttatttaagttcaacattgagatagtggagttaaaggattttttaaaaaaatatatagtagcagtcatatcttcactgttttattatcagtatatatttttcagtattctttgtgaataagactttaatgtagcttctatcattgtagtcttatattaagaagtcttccaagagtttaaaagtagggttgaattttgcagagccactacttagaagattaccaaataaatgctgaaatgtgaaaatatcaaaaccaattattttctggacttcttagtatgtataccaattacatactaagtcttacatactaagttttacatactaaatttacatactaagttttagtacaactagaaactatagttttgtgaaatgttaatattactccattagctccttcttaatatcttatcctgagaaatgccatgtgacttagcaggcgcatctagaataatgaattaaaccatccagctctgagtcagatgctaattagagaaaggactcctcccaaaaaataaatatgaacattttcaaccatatttgcatatttatcctggattagtatatttcatattaacactcttcaaagagaagtgacctgagtgaataagaattaggataggagactattactatgggaatagaaaaaaatctgatgaacctgattaagcattggtaactaatggcaagagaagtttgctacacacaataaagaggacttgaggggtgtagatatgaaaaaatgtagtttctttatatttttgcctagggctagcccaggggctttagaaatggatggctatactgtggctgacagcagggttgcaaaaattaaggtcatttttatgtacaggtctgtattttttaaactctttgactgcgttttcatgtaaaacttaagtcctttagctgccatgttgtcacgagaaggaaggaagtatgtatttagaaggtactcatagaagcccgtcagaccaaggatctgtgaaatatggttttgtcaagaaaggcacctctgagtctattacaagtacaatacaatgtggtctgtaatgaatccccaaccctagagagttctaaatatagaatagatagtcaggtctttggatggtttaagcattaaactgcctaaaggaaaggatctcctcagatgacctctcagtgccccttgcagctctgtaattccaagtctgagacagttggcttatgacgtgcactgagcatatggatgtgcgcaagtatgtttagtgtatatatgtatatatagatgtgtgtatgtatgtatatatatagatgtgtgtatatatgtatgtatatatacatatatataccatagagacgttgtgtttaatattcgtaatgttccttttttcttatcctgttatatcctgcagaatttgtgttttttctacctttctctgtgtatttgccttatatacaaaaacatatacctatttacttttgcagttgaatagccaacacatggagctcttaaacgtttagtttcttcattaagcattcttacaattttatccctgatattttcttaacagaaaagctatgtgtgtctgtttaactttaaatattgtggtaagaggtgaaaggcatattttcaatatagtatgagttttgttgtttactaggagaaagaagtgtaaagcatatagtttagtttggagacccaggatatttacagataccagtagagaaggaagatgtgggatagaattaatatctacttgcattttgttattgtttgtggaacaataaaaggttttctggcatagtcattctgatagcggcatgagactgcagaggattaaacatttatgcattgtgatttggctctgaggcgtgataactacagttggtcgagaaactgaagtacagaaatgccatgtgacttagcaggcgcatctagaataatgaattcaaccatccagctctgggtcagatgctaactagagaaaggagtcctcccaaaaaataaatatgaacattttcaggcatatttgcattcaagatgaaaagtataatctgctctgtcatgagtcctgggacaggcattgtacagaaagctcaaagaattgtacattgttgttttaagaaccaacacagtrgttgtttcttgctggtaaaattatccacaaaaaactggtcaaggtcagaatagagatttcatcaggatgcatgtaattgcttacaaatctttgctacttttttacttacactaaaggacaaagcattttcattttcagctctcaaatattcctcctcacattttaacaccaccggggctttcatggatttgtgaatatttgtatgtatgtgagcttgataacaaacataaatttacaaactttaaaagacaggctattcttggccacttgttcccagacaatagtgataggattccacttgccctaaggccagttctggcctgcatttgttgcctttgccaaattgccatctggttactttgtcatccctagtcagctcttttatgtgattaggaaggaacacttctttgggcaagatgctaggtgcagctgttaattggcaccaaggttttcttcctagtacttggaacaaaatggttattatcatcagcagcaacttgaaaatagaaaatttgaaactctgctcatatgacataaaaatattaccagaaatataaactttatatgtaatagctaacacaaattggaaaagagcttcaaagtttatgctatgttctttaaaaagtcaaaacaatctaatgacaatttactatcatatctaaaaatatttaaggaactttaccttgccttataacttcttgtttctctttggactagcttgattgagtgattatttctgttcataatgcattaggttcttgtagggtttataaaaaagtggaagaaagggctgggcaaaccttcccaacacaggactccccagagaagagattgacagatgctgcttttagcagaagaattgatgagtcttctttctccctgtgtttcgggccatttcataactgcattgtaacaatctgagtatgggggcggggggtataaaacctggtgtgaagcacatgtactagtttatacggagaatgagatagatggtcagaaagaggttttttgccccccagttcctagtgccaagctggcctggccctttgttggtcaagatcatgtaatttatgcataagacagaagtcaagtccaaattaccaagaagtggaaaggctagggagagagacagcactataccagtagtgtgggtgagatgcagtaaagaggacaagtgggtgtaccatgcatggaaactaacctttaactcacttatgcaggggtccctgcagcatcttgagttctggatactcagatatattaggagaaggagctgtgaggagatagtgagaggggctgatagttatgttttccaacagtctcctctcctaaggagaagaaatggtttcctatggaaagtagaagcataagacaagaacagttcttcacaataatccttgcctttaagaaatctacgttttccttgatgtgtgcagacaaataaaagtaaagcagtaattaaaaaatacccaacagtatggtataatgtgttaatctgtgacttttagaatgtggaagttttctactatatactagagacattgcattgagttagcttatgtaaaattgctgtcactttaccctgtacttattaaaaacaacatataaaagacttcatactaattacaaaggcataaaaattacagaatggagagattgtgtgtattagtccgttttyacgctgctgataaagacatacctgaggctgggcaattttcaaaggaaagaggtttaattggacttatggttccacgtggctggggaagcctcagaatcatggtggaagtcaaggaggagcaagtcacatgttacgtggatggcagcaggcaaagagagcttgtgcaggaaaactcccccttacagtagccatcagatcttgtgaaactcactcactatcatgagaacagcatgggaaagacctgccccatgattcaatcacctcccacctggtccctcccacaacacgtgggaattcaagatgagatttgggtggggacacagccaaaccatgtcattgtgacacaagaatgaaaggcacatctctgcaatgtattcagtagacatttagttcatttttattatgagaagcaatatttcactagtggttgagaatttcagctttggagccacaaagtcctggatttgcgaccattgccgtgcagtagttgtatgaccttgtaaaagacatttaccctcattgagactattttcttatatgacaaatagggataatagtaattatcatgaagaaaaatatgtaaagcacctagtgcatcgttcctggcccataaccgttaataatgaagattatttatattgccagtagtgtattggctgaaatacaatagataaaagtaaaattcctcttttgaatgggaggtgattagctaggactgaagttagtaaaaaaatttgtgtgttgtgtttagaggatcaggtgtgaatataaggcagtaggaacaatttaataaagtatgccaccagtattttcccttgtgtcacaaaagtatgtagacatgctacatctctaaactaaaaacaggaacaaaaaacaatttttctttcctttccagagaacagcttgtgccccacatataactgaatcttaaaataaattttattaggattcctattaccacctcagcatgcctgtgacaccccattgagaatctcaggagcaagtcctacatatccgtggtagcaacatgttattttctaatgttcatgattagtttgtttttgaaagagtaaaatctgatattctaaaattgcatgtgtagtaaccatgaataaataattttgaaccattagactgattctaagagtcatgtataagagacccagcttcttttagccaccctggaggcaggaaccactttgtcttgttcacacacagacctcaagtgcataacaggtgcctggcacatagtgttcaataaatatatagagttgctaagagaatgaaaaatctatggtcgtacttcacatattatagtacccagaagatcattccctagtagagtggcaaggatattgaatttggaattgaatagctaagtatgaatacaaaagagttagggtatcttggagacagttttctgtacattgggttgttttatagattaagataataatagaaacaacttgggaaactgtacaattatgatacatattcttaaaagttattacttcacttgagcaccatattacctagttttttttttttacttcgtttgtagttttactcctttggatgcaaactgagaaagccacttaacattatttttacatgataacactaatattccacctaagctagcggtccttaaaaagcttagaacacttttaactgcaggaagacaactgtgtattcttaacatgtacctcatttgataaaaaagaaaaaacatgttaaaacatagatgaagaaaatatctattgatgcttttaataaatyctgctagtctagtgcctagaacaaggaagctaaaggtaaaaatatgcactagaaattttgaaatcggggactttgatttcattctctatttaacatatttggtgggcaagatggtcatttaaatatgctgtatcaattgtagatttagtaaacatttctttgttcattcagctaaaattcattgagttcttttgaaatatgttgatgtattaatttggcttgtctttgtaggtccagttgataggcagtcacaatagagtgccttagaaagacaagagctgcctgattactagtctagggcagtgatattatggttagaaggttatagtttggcacaaatagcctagatcagatttgcagcccagttacttgttagtaacttaattgtgtgcaacttatttaacataagccttgattttttatctgtaaagtaggcatactattgtctatgccatacagctgttatgaagattaaatgaaattatgattgaagggcatttgttatagtatctatcatacaaagcatgctcagtaactggcagctcttgttatttatgaactctgaactttactaatggtaattatctatgaaaatatatcagataggtacactctgtcttatatgccatacttcagtgatgataggtttagacttcatggtgttttttattttcgcctgctttaaaacatatgattctttaattatattagaacatttaaagtctgaatattggaaaataactttgtactgtgtgtatacaaatttggccatgtaaatataaaacttactgaattatcaaatatctgatctcatttttgtggtattaattgatccaagtaatttaccacctgtcaatccctgtggatagctggaaggcccaagttgatagattgtttaaagaaagcacactttgtttcccaaaaattgaaaaaaacatgctagctttatgagctgactagctaaaccaagaagaaattaaaaagaaaaacacttaaatagcataagaggaagtaatgagtatastcttactgtagtccttgtaactcctctgaagaaaatacaaaaatattttctttgaagtgtaytaagttctgtgagtttcagaaatatagaaaatgttctcatgtaagatataaaaaaggttgmaaatgaaggaattagtttgcattgcctgtgtaatcaccttaaagtaataaattaatgaattatctcaaatcaagaatttatggacattcctgtcatatttcaataaaagggaagcttaaaaattaatgtatccaaaggaactgaaagcttgtattcacacagaaacctgtacatggatagttatagcagcctttttcataattgccaaaacttggaaggaaccaagatgttccttagtaggtgaatggttaaattaagtgtgacccatccagacaatggaatgattcagtgttaaaaaacgaataatcaagccatgtaaagacgtggtgggtggagtaaacttaaatgcatattactaagtgaaaaaagctaatctggaaaggctacatactgtatgatttcaactatatgacagtccagaaaaagggaaaactatggagacagtaaaatgatcagtggtttccagggatatccagggaggaagggctgaatgggtgagtacagagtatttttagggcagtgaaactactctgtatgatactataatggtggatacatgtcattataaatttgtccaaacccataggatacgcaagaccaagcatgaactctaatgaaatttcagactctgggtgataatgatgtgtaaatgtaggctgtgcatgtgtaggagcagggggtatatgggaaatctctataacttctgttcaattttttagtgaacctaaaactgctctaaaaaataaaatctgttaaaaattaattatcatgtcaacaaagagataattctctcttcccagaaactacgtttggcattttagtctaaggcaatgaggatgtgggctggcagcaatatttatttcaacacagtggatargagcaaactgttggaaacaatcaaaatgtccagcaatatgggcagtgtttcagtaagttatatccatgtgaaagtattcgaagtaattttctagagttctgttttgtggcagattccatcagttgaattcccaatatcttttcctttgttctcgtatgctaacaaaacccagatattgttcagggtagcagtgtccactgctccaggcacaaaatggtaacaatcctatttccactttcctagctttttttttttttttttgcaactaggtgtggtggtgtgttccagttctggtcaatgaaatgtaagggaagtctaatggatgcttttgagaaagcttttttctctcctaataaagggggcaaatgtgaatgccagcaatcctccactgcagaccttatgttaagtgagaaaaaattagctatttgttaagcaagagttggttgggttttctgttacttagagtctgtaacgtactgtccagatccttttcgagacttccagatagtgggatactgattgacagcctttatccttcacttatctccaggagttgcactcagttgaagtcagctgccttgcccagtgtcatacccgcttcccaggggccagcccacatcaaaatacacaagagtataagggcccagccttgtttctttaatttgggcaaactctcccaggctctctcagctccagagctggagtctttctggatactgcacctttctgcctaatccttctttattccctttccccatagatactgatttcaagagcatttcctaataattttcctgctcagatacacacacacacacacacacacacacacacacaatcttagctcattgtcttatacattctattgctcaagcaatagtatatgaagcattagagtttttgaaataactgtaacattttacagaaatgacagtgaaatatgagctaatataactattagkgataggaaaagcaagtgtttttgctactctcccgaacagatggaaaccagatgcatctgtgggttttttccatacatcaagccatcagttttcctttggacaccagctgggtgtcctaaaatgcaactgtgacactatgtaccttgagatagtgtcagatcctacaggttaaggtctcagttccactagactacccctatatcagatgccacttgccagccccaggttgagatctgtgcttctgaccagttgattataaattagggttcccacgaccccctccttgggcttcattaatttgccagatcagctcacataactcagaacactatgcttacttttacccatttattataaaggatattataaaggatacagatgactagccagattaaagagatggataggttaaggtatggtagaaggggtgccacagtccaggcagctccacaatttgagcaacctggaaactctcagaaatccatcttttttggaaccctcatatactgttggtgggaatataagttagtacaaccactatggagaacagtttggaggttcctcaaaaaattaaagactggacctaccatatgattcagcaatctcattactgggtatataccccaaagaaaggatagcagtatatccaagagataactgcactctcatgtttgttgcagcactcttaacaacagacaagatttggaaacaacctaactgtccatcaacagatgaatggataaaggaaatgtggtacatatacactgtggagtactattctgccataaaaagaatgagatcctgtcatttgcaacaacatggatggaaccggaggtcattatgttaggtgaaataagccagacacagaaagacaaacatcacatgttctcacttatttgtgggaactaaaaatcaaaacaattgaatacagggagatagagagtagaaggatgggtaccagaggctgggaagggtagtgggaggtgggtggaggtggggacagttaatggttacaaaaaaaaaaatagaatgactaagccatactattgactataggcacaacagggtgctcacagtcagtaattatacatttgaaaataactgtttaagagtaaattagattgttagtatcacaaagaataaatgcttgaagggatggataccccattcttcatgttgtacttatttcacattgcatacctgtatcaaaacatctcatgtaccccataaacatatacacctattatgtaccaacaaaaatttaaaagttaaaaattaaaatatagaaatctgcccttttaggtttatttggagtcttcattacctaggcatgattgattaaatcattggccattggtgatcaactcaacctttgttccttcttccttcccctgaagttgtgtgggtgggtgggaaatgaaagttcctttctttttctaatcatatggctggttcccctggcaaatactcccccatcctgaggctatccaggctatgctgattagtcatctaatcagcatgaaaaagataccactgcttgtagatcccaagggttttagaaactatttgccaggaaccagaggcagacaccaaatatacatttcttatatcacaatatcacagtatttggtgctgtgctaggtttggtgctatgtaagaacaggaatagaaacagattttttttaaactttctgtatcatggtgaaatactttttgacccttgatgttgcaaatcaagacttgaacatgaaattttaggtgaacttcatcttggtgaatttcaactctggaaggattcagcttttgcagaaaacttcaattcacttttgtctatagtcagcaataaaatggatgcttcctgacctttaaatttcaaaagaactatttcaaatcaattttgtaagagacctttcgatgataatgtgcaaacccatccgtccaaaaagagcaccttctttgaaaaaagtgatgaagaatcaataaaaattgttttcagaaatctctataaagctttgcatgaataggatagttatgctaatataaatgttttgaaactttttagattattcaaatctttacatttattgtgactgtctttgagctaagtatcagttttggctacaactttaaaacaattttttttcaacagactcatctttcacttatgaaaaaacaaattgtcaatcttttcactaatctccttacctgtctgctatacattttcaagcgtctgatacacagagactcgaagattatcccaatcttttgtaacaagaaaccaacccattgctgtacccagctggtcagcagtctttaggtttgcaaatagtgattttgaaacagatttgtaatttggaatcttcttctgagatttctatactttaaatacttttaaaaagggcattgtaacagaatactcaattaaaatattataggccaagcccataaatattttaacattttattaatattagaatagcagaattgatctacaggctataatgggcctctacttgttatttactttttctctaaatgaagaacatgtacaaattctggtaatatttgctgaaaatcctatttaatcatttcattaccccttttgtttttccatcaaatactatctaacatctaatcaaagtcaatataattgctattatggtaatgatttgttaacatgaaacaatttttccaactctgtaataaaacaaattattgtataattaaaaatgtacataaacccaactgtacataacttactcttccagttctctcctttgcctctyaaggaaagtaaaattgactgaagaaaaaaaatatgtatggagagagactttagctaatcagtgcttaattaatctggtataatccttcttcagaaccatgggatcatcaagtcctggcacttataaaattagtgggtttgggttacaatagattttgtgtttttttcacactcatgtatggtaattttaatagttactatgttttgaagcatgtcgatgtgcccatctccttacatataatattgctaatgctcacaaacttgatatttgcttctcacagaaaagcaatcctagattcgctaaagaagtttgcccaatattgcatagcaattaagtggaagagttaaggttccaatttatggtgtttactccaatgcaatatttttcccattacattattaacatttcctcgatcccctaccctggaggcaccctccactccctgacatgcgtgcacgcagacacacacacacacacacacacacacacacacttttttttctgactgctgttagcctaattaggctgttagcctaattagtagcacccagttccctaaaacctgaagtcatgatggcatattgtgttatctccttcccagagtacatgtctctggaccatcccacacctgaaatattttctcaaagtaagcagaatcttcctgcctcatatttaattctttctgagactgccctctaaattctactgaggattatgtaattaataatggcttactacattatttttcctagagagcaaaattaatattttaacccagaataatwaatgggcacacaaatatcttgatacctgcaagagatatttttccttatttagaggattttttcagctaaaaaaaaatttctaaaaaactttttagaaaatcatacaaaaaaacccagcaaagccctctttgcttatgaacaatggccattctagagctttcagcacttaactgctatgaagttatggtaattccttaggaaacagataagattayggctgttaggattttcagtagcctaaaaaatagatgagtgtattaataaacataatttgacttggcaagggtttttgtttaacatattaccaagagaccttataaagattacctactagtttactatatacataataatatacataatatatatattatgtgcataatagattgcctactaatctaccttagcatccttaaaaacagtcaacttttgttttttatagattgtcagtacttatatagctcctatgtactatgtataatgatgctttttataaatgtagagatgaataggaaatacttcctgtcttcaagactttcagtatgtgggtgaaatcagcagcattttttatttaacatttatggtatcatatatgcagatatcccaaagagacactccagaaagctttcaaaatagagtccataatgtcttccaaaccttgtccaggaatatgagaagaagagtagacaaaaatccctcaataagccaattcttagagtgcatgcttcacatgcaaatagaattgcagaaacagctttggctgttccttaccattcctagggcaaatatacacattaaactctcatttcagaaccagcttacaattaaaataaataattcagtttttacttggtgcaataaatcagcgtatttattttgcatgaatattacgtaaacttttttgggttctatatatcttgtagacacttgctcttaaagaacatgctgtagtgataggaaaagaaggtagcaaagatattataaaattagcacaagatgttatataattgagtaaaatgcataatgtaggccaagaccattctgtaaaaatatgtgagtcacatgtgtgattttgttatctcatagccatagttttaaaaagttgaacaggtgaaattaattttattaataaatgtattaaatttaatatatctaaaatattataatttaacataatataaaattattgagacatttataatttttatactaaatctttgaaatcctgtgtgtatttacacttacggaacatcttaatttggacaagatgcatttaaaagcaccaatagccatgtgtggctataggctactgtattgaacagttcaggataaggttagaattacagatgttcagagaaagagaagaggtgtatagtatatgcaacacttgttctgggtcatgaaagttgtgtagaatttgtgtagatggagggcaggagtttataatagtaaggaggaatgccagatttgaaacactgtttactgaagattatcatagtagttccagctgttgaacaggttaccagtttatcatatacttcaggttactattaaggaaagttgatacataatttaaggagtgtatagtacccaattagttattcttaatattttttcccaaggacattggacaaaaccataaggttacacagtatttccaaagaggtattaattaagtataatagtaatctttcaagatattatgaaagtctaattctttggtttaaatgtttcaaaaactaactctttttggtgattcataatgaaccctgacatactacattttcttggattcttggatgtactgtaagtaaaacttttttttttttttgagactgagtgtcgctctgtcacccaagctgctggagtgcagtggygctatcttggctcactgcaacctctgcctcccaggttcaagcgattcttgtgcctcagcctcctgaatagctgggattacaggcacccgtcaccatgcctggctaactttggtatttttagtagagatagggttttgccgtgttgtccaggctagtctcgaactcctgacctcaggtgattcacctgccttggcctcccagagtgctggaattataggcatgagccactgtgacccgccgtaaataaactktttaaattctgtttattacaatcttcccaaactggctggactaagggtctcattttcacagcactgctgttaatgttgatggatctggtatcctatagaatataggcttgagagcactgctctaatgcattttgtattttcagaagtctgtgtaagatatatttgaagagtgttttatcactgcttccacaatttaggaatgctttctrattctgtctttctgattacatggcaagtccgtcacatttaggtgatgagatttattcatttattcactgaaattactacctttcttctcatttatagaaatgcatttttcgtgaaccacagctgcttatgtgatttctaatggctcatataaattgataaatagtagacacagtactttgtttgtaactcattaaatattattttgttaaaatgtccaggaatatttgcaatctgtatttgattatccatgtatttttaactgattttcaaaaaatgatagtaaactgtaaaattttcagcagttttaaaaaagtataattacttaacactcacaaggtacatgcctacaccttgtctcaagaaacaactatgatttctgtacatattcacaatgtagacacagatactatcatgatttgtcacatgagtctacttttaaatatttaatcgtttatgataaagtagttgatgattttttctttttttattagactttaagttctgggatacatgtgcagaacgtgcaggtttgttacataagtatacatgtgccatggtggtttgctgcacccatcaacctgtcatctatattaggtatttctcctaatgctatccctctcctagctccccaccaccaacagaccccggtgtgtgatgttcccctccctgtgtccatgtgttctcattgttcaattcccacttatgagtgagaacatgcartgtttagttttctgttcctgtgttagtttgctgagaatgacggtttccagcttcatccatgtccctgcaaaggacatgacttcatcctttttatggctgcatagtattccatggtgtatatgtgccacattttctttatccagtttatcattgatgggcatttgagttggttccaagtctttgctattgtgaatagtgctgcaataaacatacgtgtgcatgtgtatgtatagtagaatgatttataatcctttatataccaagtaatgggattgctgggtcaaatggtatttctggatctagagccatgaggaatcgccaccctgtcttccacaatggttgaactaacttacactcccaccaacagtgtaaaagcgttcctattgctccacatcatctccagcatctgttgtttcctgattttttaatgatcaccattctaactggcacgagatggtatctcattgtggttttgatttgcatttctctaattaccagggattatgagctttttttcctatgtttgttggctgtataaatgtctatttttgagaagtgtctgttcacatccttcacccacttttggatggggttgtttgttttctcttgtaaatttgtttaagttccttataaattctggatattggccctttgtcagatggatagattgcaaaaattttctcccattctgtaggttgccttttcactctgaygatagtttcttttgctgtgcagaagccytttagtttaattagatcccatttgtcaattttggcttttgttgccattgcttttggtgtttcagtcatgaagtctttgcccatgcctgtgtcctgaatggtattgcctaggttatcttctagagtttttatgatttttaggtcttacatttaagtctttaatccatcttgagttaatttttgtataaggggtaaggaargggtccagtttcaattttctgcatatggctagccagttttcccaacaccatttattaaatatggaatcctttcccttttgattgtttttgtgaggtttgtcaaagatcagatggctctagatgtgtggcattatttctgagacctctgttgtgttccattggtctatatatctgttttggtaccagtaccatgctgtgttggttactgtagccttgtagtatagtttgaagtcaggtagtgtgatgtttccagctttgttctttttgcttaggattgtcttggctatgtgggctcttttttggttccatgtgaaatttaaagtagttttttctaattctgtgaagaaagtcaatggtagcttgatggggatagcattgaatctataaattactttgagcagtatggccattttcatgatattgattcttcctatccatgagcatgggatgtttttccatttgtttgtgtcctctcttatttctttgagcagaagtttgtagttcttctttaagaggtcctttacatcycttgtaagttgtattcctaggtatttaattctctttgtagcaattggtgaatggaagttcactcaagatttggctctctgtttgtctgttattggtgtataggaatgcttgtgattttcacacgttgattttgtatcctgagactgctgaagttgsttatcagcttaaggaaattttgggctgagatgatggagttttctaaatatccaatcatgtcatctgcaaacagagataatttgatgttctgtcttcgtttttgaataccctttatttctttctcttgcctgattgccctggccagaacttccaatactatgttgaataggagtggtgagagagggcatccttgtcttgtgccagttttcaaaggcaatgcctccagcttttgcccattcagtatgatattggctgtgggtttgtcataaagagctcttattattttgagataggttccctcaatacctagtttattgagagtttttagcatgaaggggtgttgaagcagaaaggtatgaaggccttttctgcatytattgagataatcatgtggtttttgtcttcggttctgtttatgtaatggatgactttattgatttgcatatgttgaaccaatcttgcatcccagggatgaagcctacttgattgtggtggataagctttttgatgtcctgctggattcagtttgccaatattttattgaggatttttgcatcgatgttcatcagggatattggcctgaaattttctttttttgttgtatctctgcctcgttttggtatcaggatgatactggcttcataaaacaagttagggaggagtccctctttttctattgtttggaatagtttcaaaagtaatggtaccakctcctctttgtacttctggtagaattcggctatgaatccatctggtcctgggctttttttggttggtaggctattaattactgcctcaatttcagaactttttattggtctattcagggatttgacttcttcctggtttagtattgagagggtgtatgtgttcaggaatttatccattttttctagattttctagtttatttgcgtaggggtgtttatagtattctctgatagaagtttgtatttttgtgggatcagtggggatatctcctttatcattttttattgtgtctatttgattcttctctcttttcttctttattagtctggctagcattctatctattttgtaatcttttcaaaaaaccagcttctggattcattgattttttgaagggtttttttgtgtctccatctccttcagktctgctctgatcttagttatttcttatcttctgctagcttttgaatttgtttgctcttgcttctctagttcttttaatagtgatgttagggtgtcaattttagatctttcccgctgtctcctgtgggcatttactgctataaatttccctctaaacactgctttagctgtgtcctagagattctggtacgttgtgtcttggttctcattggtttcaaagaacttatttatttctaccttaatttcattatttacccagcagtctttcaggagcaggttgttcagtttccatgtagttgtgtggctttgagtgattttcttaatgctgagttctaatttgattgcactgtggtctgacagactgttatgatttccattcttttgcatttgctgaggagtgttttatttccaattatttggtcaattttagaataagtgtgatgtggtgctgagaagaatgtatattctgttgatttgrggtggagagttctgtagatgtctattaggtctgcttggtccagagctgagttcaagtcctgaatatccttgttaattttctgtctcattgatctgtctaatattaaagtctcccactattactttgtgggagtctgagtctctttgtaggtctctaagaacttgctttttgaatctgggtgctcctgttttgggtgcatatatatttaggatagttagcttttcttgttgcattgatccctttaccgttatttaatgcccttctttgtctcttttgatctttgttggttcaaagtgttttatcagagaygaggattgcaacccctgttttttttctttttcttttttccatttgcttgataattattcctccatccctttattttgagcctgttgtgtgtctttgcatgtgagatggktctcctgaataccgcacacccatgaatcttgactctttatccaatttgccggtctgtgtcttttaattggggcatttagcctgtttacatttaaggttaatattgttatgtgtgatctgatcctgtcattatgatgcattaagttgatcttcaatctctgatatcctttcttctgctggattgatttgtctgttgatacttgtgaatgcctcatgaaattctcatgctgtgtttttcagctccatcaggtcatttatgttcttctctaaactggttattctagttagcaattcctctaaccttttttcaaggttcttarcttccttgcattgggttagaacatgctcctttagctcggaggagtttgttattacccaccttctgaagcctacttctgtcaattcgtcaagctcrttcaccacccagttttgttcccttgctgccgaggggctgtgattctttcgaggagacaaggcgttctggtttttggaattttcagcgtttttgtgctggtttttccttatctttgtggatgtatctacctttggtctttgatgttggtgaccttctgctggggtttttgtggggacgtcctttttgttgatgttgatcctatttctttctgtttgttagttttccttctaacagtcaggcccctctgctgcaggtctgctggagtttgcttgaggtccactccagaacctgtttgcctgcgtatcaacagtagaggctgcagaacagcaaagattgctgcctattccttcttctggaagcttcgtcctagaggggcacccgccagatgccagccagagtgctcctgtgtgaggtgtgtgtcgacccctgctgggaggtgtctcccagtcagggggaatgggggttggggactcactttaggaagcaatctgtcccttagcagagcttgagcactgtgccgggagatctgctgctctcttcagaggctgcaggcaggaacgtttaagtctgctgaagctgcgcccgcagccaccccttcccccaggtgctctgtcccagggaaataggagttttatctataagtccctgactggggctgctgcctttctttcagagatgccctacacagaggggaggaatctagagaggcaggcagtctggctacagtggttttgtggcgctgcagttggcttcacccagttcggacttcccagcagctttgtttaygctgtaaagggaaaatcgcctactcaagcctcagtaatggcagatgcccctcccccaaccaagctcaagtgtcccatgtcgacttcagactgctgtactggcagcaagaatttcaagccattggatcttagcttgctgggctctgtagacatgggatccactgagctagaccacttggctccctggcttcagcccctctttccaggggcgtgaacggttttgtctcggtggcattccaggcaccactggggtatgaaaaaaaactcctgcagctagctcaatgtctgcccaaacggccacccagttttatgcttgaaacccaggtccctggtgatgtaggcacctgaaagaatctcctggtctgtgggttgcaaagactctgggaaaagcatagtatctgggccagaatgcactgttcctcacagtacagtccctcctggcttcccttggctaggggagggagttccccaaccccttttgcttcccaggtgaggtgatgccctatcttgcttcagctcgccctccgtgggctgcacccagtttctaaccagtcccactgagatgagccaggtacttcaggtggaaatgcaaaaatcacctgccttctgcctttatctccctgggagctgcagaccggagccgttcgtatttggccatcttgccagccaccgagtgccaaacatctacctattttttcttatgtattgtttttgttaggctttgtactgacaataattaaaatatttgcctgagataattttcaggtctcctatttttacccttccagaagatgctcagaggcttacttgtttataagaaattgggccagtgaccatttggacagtcttctattccttattgcctcccttcactgtataaagaagctgtaaagggtgacccgctgaaatagatggcggtatgggtgtggaaatcagtagacactaagtgttctggtcatgagagcccaagtgaggggcacccctagtcaagccttgcacagaggagtggatttgcccttggagcattctgtgtactactatcattggtagggatctgggcaatgagtagtggaacagatggtggaggggcagaatctgagggcaatcagttctaaggtaaaggtgaaggagtagcagcctgactaccctaggccagtggtgtggtcccagtcttgcttggagtagaagtctggccatgccccttttgatctgcgtatgtctgcactaccagaggggcccatgacctttgcctaaaaaataatactagatttctcatgatctaatcagtgagaccttaagacagttctaattttatttgagaacaatggaatgtataataacatgttttctgtgtgtggcattgcattttgaatttcagttttcctttactttgggccaattaaatctttaggacttcctttccaaactaaatttctctgagtgaccaagctcattgtgtctgtttgtctagtgtttttttttttttttaatttttcggtatagtactgttttaaaatgtaaatcagattaagaattaatctttatcaatcattgttaaaggactgtcctgtttaatttttctcctctgggattaagtgacagcatccccttatatgttttgttttggtttggtttggtttgtgcagtactttaatcaggcagttttgtctgttattaaaatttctgaagcctttctctctcggtatcttgctgtttttctatgccctaatgttagcaaagtaaacacttggacttcctgcataatactaactggaggaatctctttttcccttccatgctctgtttgcactctttcaatggcccaagaaacagctatgtaggtaaaaggtcttttgttaaaaagaaggaaattgagcagtcatttcccttttccttctttgacctgtatcagcaggcaagtggttgttgctatgatcttttcagtttacactgtttaaaagaatcaatgattgtttcccagaactttgaaaaatctacacaaaaataatttaaaatgaactatacatatatatgttttgtcttaaagttgaattatgaagtttaagcagttgtcttcatttgaattgatgatagctatttgttgtatgagtttcaggtattctgctatcatttcttttcttttcttttcttttcttttttttttttggacaggatttcactctgttgcccaggctgaagtgaagtggtgaaatcacaactgagtacagcctcaacctctggggctcaagcgatcctcctgcctcagcctcttgagtagctgagactacaggcatgtgccaccatacctggttaattttttaaattatttgtagagacagagtctccctatacttcccaggctgctctagaactcctgagctcaagcaatcctctggcctcagcctcccaaagtgctgggattatgggcatgaactaccgtgcctggcctggcgtctgctatcatttctaataaaataaaagacacagatggcaaaactctaaatgattgtatgactttgttaggcagtggttttgaaaagcagaatacttaaaatcctatgtaaaacattttgtttttttttaattaaaataattccattttcacaattatgctttatgatttaattagctttatgagaattctgttgtcttatgggagagatgtgatttttgtttatttcagttgtcttgagtgtattctcagactttcaacagtttatatttcccttagtctactagctgttaaaaacagtccagtttcataggcatttttgttttacatagtaatatcagacaatgatagggaacttagtaacttttctttcaattttggggaaaaagataaagtccttgaaaaattctttttaaactgttccttggaagaataaaagcatttgaaatccccatgtgcaacaagatcagcagatcttcaattctcaactttaagaactgcaagcccagaaatttgtgggtttcttaaacccctatttttagctatttgtaaaagtcatatctctaccttcattgtctcttgcttcagagaagacatggttagtcctgtaatagtccagcattagtgctttcaagggaaggagaatgattgcataactggttacatttaaaatgagtaagaatgaagattcttgagtgttgctcacaggtatwtaggaaaaggagctactgttatgactgtggaatctccattgcattttattagatacaagaaaagcacgaatgccagaccagactcaagaagagaacaatttgactctgctttcaaatggagtggcaaaatcacattgaaggaaagctggtgggatgtagtattcttatacccatggttggcaaatacagtcagccacaacagtttaccctaagaatcttggatttcattccatatgtgattaacagttagtgaataatattagttgtaataatgtaatcagaaacatgttttaggaagtttactgatgaattcttgagaggaagaagataatcaaggaagtcattgtgttttgttttttgcttttttttcctctcaaagattcttgagcacatctgtaggcagaatagacagaagtagaaaagaagaaaataacaaataatcttaaagttggacggaaacacagaatacttctttaacaggacaaacgatcttagcagaatgtcaagttcaagtgcagacaacaaccgctgtcagccctttagttatttgaatacagctctcatcatatacctgctttcattaggtagaaaaatttcaagatgtatcataaaattggatactttcttcgggagattctttgtcttgtctatatcactttcatcaaagcatcttatagtccagagatttttaaattgccacaataagattcccaaatattcccacatattcactgtaaagagctcaagttttgaggagttcggaaaagcagctgtatttgtttgggttgtcatgtatgtatatatatctccacccaatatacaaattggttttgtttctttaaatgtatgatggaaactaatgcatttgagtatctaataatcacaatattttcatcttgaaatatatattactctgaatattaaaaagttgaaaattccatcttaagggactttactttctctgtttttattcacatcaagtttgctttctttatgttgtatcacttaaaatggtgacccatctcttatagttaaatacatttgaaggattgactttcttcagtttttaaggaatacaagaacaaagtagagaataaatttaaccctgaataaactatattacatatttaatcaagttagaaagttgtttactagaactagtttatatctgacgtactggaaataagtggtatttggagagtttgaaactccaaaagagtatagatatattgtatgtctgataatgctaaggagaaaattaaagtaagatgaggagaaataggagtgcaatggtagttgcattttatgtaagatgttcacaaaaggtctttctgcaaagatagcatttgagcagagatctttgggtggctaatttgtgggaagaatattttaggcaaagagaacatcaagtgtaaagacctcttagcaggagaggactgggcctgttgatgaatgagccaggagaacagtgttgtagcagagtggttaagagggagagtaatggcagatgaggcctaacatgtgtatgggggaagttagatcatgaaggcatttgtaaggattttgggttttatctgtgtgacatagtaaaggttatgcgtgctttataaggaagagcaacatgatctgacttctgatttgacaggtgcactctggcatcagtgttgaaaataccctgatagcagggtaatcaggagaaagcaatggtagctgacagggtggtagcagtggagagagagtcataaggaattgctagaggattaatatgaagtgtgtgagaaagggacataggatgcctggtttttagattggactgtaaatatggaattgccattttctgagatggggaaggagattgtgagatgagcaagtatttggaggaaaaccaggtatttcctttgggatgtggtaaggttgagatgtctattggacatctaagtgaaaatgttgagtaggccatagaatatgtgattctggatttcacaggctagatctgggctggggatagagatttggaagtccacggtatatagctgggcatttaccacgtggaactaggtgagatcacctggcagaggggtgtacataataaagaggagaggtccacgaactgaactctgaggagtgtgcacttgtggagattgtggaaactatgaagaagaaccagcaaatgcttggtgagggacaagccaagaagtgaggaggaaaaccaggagagtttgttgtactcgacgccaagtaaggaaagtacatcaagaagggattagtcaacactgacagatgctagttcttaaataaggtgaggactgaatttagcagtggtcttagcaatatgaagatcattcattacttggacaaaagctgcttcattgaaattgtggtgacaaaaacttgactggaatatctttaaatgaaaattggagaaaacagaagtagagacagaaaggatgagagatgcttttgaatgatttagccataaaagagagaatagaataagtcaatagctggagggaggagagggattaaggaatttttgtttgtttttaaggttaatacattatgtttataaggaataatctgaataaatttgtaggcaataatctaaagaagataaaattaaccatgtaatggagaaggaatgcaatttctggaatgaggcgattaatttgctgagaggggatggaacgcagtgcaaatatgggagagctggccttggatagacacaggaggtgtttatctttagcagtggtaagaaagggagattacatggacagagttgcaagtggattgggaatgtggaactaggagtctatagaagttcttttcaaaatgcttctatgttttcagtaatagaccaatgtgagagtgaggataataggagaaggtgttggaggtttgagaggagagtaaagaatatgaatatatcacctaggcgagttagggatgcactaataggattgctggagagcacccagggaaacgctggagattaaagcttatgattctaaaatgtgatcactcagcataatcagtaaatattgttcacaaaaatgaattaactgtgaatttctcagttattttgacatcatgtagccatgcagttgctaggtcattacaaggcaataaaaagyagatgtatttcctaaagaaatactgtaagatctggccaagtcagtggatttgctacataacaaaggcacaatcagagtttctgctaattcagtcctagatgagagtaaattgtgaaattagaacaatcatataggcttttgagataacagactttaaaaaaacatttttctacttttataaatgaagaagctgaggtccagagaggttaaaggattcccttgttgtgaatcacattaccttttacaaagaattttgaatattctagtaaatatgctcttccaggaatgttacattttattctawttttattccttttaatatagcattcctgttaggtttttcaatttgtgtttgattgtacagttatgtaaattctttttgacagatttgttattaagggaagaaagatgagtatgaattctaacagctcattaattttaaagaaatgtgtcatgaattaatgctttgagtgctatatttttctctttacattatgtttttctggttgaatagaattctatcaaaataaataggttatttaaaaatgattaggtaggagctatataaagattctcctaagcatgttcaccgttcctgagaaataggttgaatgtaatacccaactagtgaagcattatcatcagcaatacatgattacattgtagcctttctttacaaagctagttataaaaaatattttctttgtaaaaggttttcaaagtgtctttcacttgagtgagcatttagtgaattaaagtcctttcaccaaagtatatatttcttaagcatattgactacaaaaaggatgtccttgacctacttgtttacaggaagtgaaatcagttactttcgacctttagtatagtagcaagtttaatgaggggtgagtaagctttcactgtatagatttcaacatcacctgactttcttgaagttcaggaaaaacaccatttatctcagtttaaaaatatgcacacctggttaaaaaaaataaaagcaagttcacactcctctgtgctctatttgacagataaaatatacacagggcactagtgatcaaatgtgggtcaaagtatctgctttaataatgggcaagatagttcccaataatttcaaaatatagaactttctggcaaaggtgcaatggaaaatgtatcttagacctgaggctaaattgaaaacctgcctcagatctaatctttggaaccccagatctaatctttggaacccactcactgtccaacaggctttactacctgagaacatgaagcaggagagaagggcaggggcgaggtgggggcctgcacagggtcaggatgtaggaggtgcagaagacagagtttgtagtgtgtgtgaatatgtgtgtgtgttctgtatgtacgtggataatatytaatgaattccgctcaccaactgtgaaaaattctgatggataaaatttgtcactctttatccctgaagagatttgaataagttggtagaaaggagcagaaactttttatataacacagacccttgctactcaaatgtgtggtggttcttgaatcagcaccgtctgcatcacctggaagcttgttagaaatgcagaatttaaggcttaatcccrgacctactgaatcagaatgcgctttttaacaatacttctctctactcctgggtgattgattcatgcattgaatttgaaaagcgcttcactmgttgccagatgttttgctctaaattccttcttctgtgtactaaggcataatataggaaagactcaaaggatttctccctacagctggagttcataagcttccattattgaagtgaggtgtatagtgtttttgagatagtccagtggatgggaatgtttttaagatctttcaactacaaaactgtgacagtcagagcaacttatattaaagatgtgcacattacagttctgtattagatatcatttataaaagagatttccattgactttgttgaagatcagatggctgtaggtgtgtgactttgtttctgggttctctaktctgtttcattgatctatgcatctttttttgtaccagtaccatcctgttttggctactgtagcattatagtatagtttgaagtccatagtacagtgtgatgcttccagctttgttctttttgtttaggatttctttggatatttaggctggttttcggttccatatgaattttagaatcatttttcttctaattctgtgataaatgatgttggtcacttggcaaccaacaggaatagcattgaatctggaggtttcctttggcagtatgacaattttaacaatgattgattcttccgacccttgaacatgggatgttttccatttgtttttgtcatctgtgatttcttttagcagtgttttgtagttctccttgtagtgatcttttacgtccttggttagatttattcctaggtatttaatttttttgtgtgttgctgttgtaaatgagattacattcttgatttgacttggatgttattggtgtatagcagtgctactaattttcgtacattgattttgtatcctgaaactttcctgaagtcatttatcagctccaggagccttttggtggagtctttagacgtttttttgttttttatttttgagatggagtcttgctccatttcccaggctggagtgcagtggtgcgatctyggctcactgcagcctccacctccggggttcaagtgattctcttgcctcagcctcctgagtagctggaattacaggtgcctgccaccatgcctggctaatttttgtatttttttagtagaaacagggtttcatcatgttggccaggctggtctcaaaacwcctgaccttgtattccgcccgcctcggcctcccaaagtactgggattataggcatgagccaccatgcccagccctctttagggctttctaggtatagaattatattgtcccaaaagagagataggctgacttcttcttctcctatttggatgccttttatttccttctcttgcctgatagctctggctggcacttccagtactatgttgaataggagtggtgagagtaggcattttttgtcttgttctggttctcaaggggaatgtgtccagtttttgcctgttcactatgatattggctgtgtgtttgttataaatggctcttaatattttgaattatattcctacaatgcctaatttctttttctttattattattattgtttttttgagacaggatctcactctgttacccaggctggagtgcagtggtatgatcatggctcagtgcagccttgacctcccaggctcaagagatcctgccacctcagccttatgagtagctgagactacagacacacaccaccacatctggcaaattttaaaatttttattgtatgtagrtgggggtcttactatgttgcccaagctggtctcaaactcctaggcttaagtgaccctgctgcctcagcctcccaaagttctgggattacaggcatgggtccccayacccatcccttaatgtctagtttcttaagggtttttatcatgaaaggaggttagattttattgaaagctttatccrtgtctactgagatgatcatgcggtttttgtttttaattcattcatatgctgaatcacatttatttatttgagtatgttgaaccaaccttacatctcaggaatgaagcagacttgatcctggtgaattaactttttggtgtgctgttggattcagtttgctagtattttgtatagtatttaactattgagtactatgttcagcatatgggtgctgggatcatttgtaccccaaaacccagcatcacacggtgtttacttttgtaacaaacttgcacgtgtacccctgaatttaaaataaaaattgaaaaaagagagatttgtgctgctaatttaaaaaagttgtaaaactcaaataagaaataaaacattaaacttgcagtgaggcagtctggctttaattattgagttatatacagctagctacataataagggcaagtgataacttttcagggtcttaatttccttaggagtagtttactcttcatgggctggaagtggggttggaactatataaaaatgtaaacatgatacgaaaacctgaaactttaaaataacttgaaaaagattaggccaggtgtggtgactcatgcctgtaattccagagctttggaaggccaaagtgggagaatagttaggaccaggagttcaagaccagcctggacaacatagcaaaaccctgtctttacaaaataaataaataaatwttaatatgtctatggagtaggatgcctgtatatgtgtttggtgttagcaatgaagggggttatactattgagatttgatattgatgatcaaggctttttacgccctgtgaaagggtttggaatttgacctaaggttaaggagaaattattaaaggatttatgcaaaggagtgaagttggcattttagaaggctaattctggcttcagggcaaagaacaggagttgaaagatcacagagagagatgggttagaaatcatttgaataatctacatgagaataatggtaacatgaattagaagtatggaaatagggatgaggaaaatgaactttttgtgagaatgtatctacaggaygcactgacgtatttgttggggattgatggggagaacaatgtcattggtaattcctatgttttgggacttcattgtgataggaaatataggaggagaagtaagtttggaaagaaatgattaattctsttatcaggttattttttagaatggacatccaattgtagatgtctggtaaacaggtatgcctgaaatatttatcttgaacggtgtcagggcttatttttcacactacataatttatatattactcattctcatcatcccaattattatatatatgttgtcgccttcaaatctacattatcattctgtgtcacttacctaaaccctagtcccaagtatatttatctgtctcacttgtgagtttaatcttattttcaataaaaatcatgccttgctcttcattgtaaatgaagtggggatttttcagatcccactacttgtattgggcatatggactattgttcagttttagatactgacaagcatacttattttgtgagaaagattatgattgtactggttttgatatcactcttgtacctgaaataataccttgtaagtatcccatgcttaaataaagttattgagttaaatgctagaactctgagtctttagattgcttctataaattaggaataaggaaatagatctacgggaaatagcgtaataatgataagtaaaatattattaagaacttttatgttgctaatatttctctgtcttaaaattactaagaccatgtacagtagtttccccttatctgcagtttcgatttctatgatttcagttaacctgtggtcaatcctagtctgaaaataggtatgtatagtacaataagatgccttgagagaaaatgagaacacacatcacctttattacagtatgttgttataaaatattttgtttttagttatttttgttaatctttcactgtgcctaatttagaaattaaactttatcataggtgtgtatgtataaggaaaaacacagtatagataggacttggtactatctgtggcttcaggcatctgctgggggtcttggaaggtatcctctgtagataaggggcaaatacggtaattcaaaacatttaatttcatcacattagcacttatctcaaaacaacaaactatgcttctctggggcttattcttctatgattttttttttaactttgtcgcctatgtgattttttcccctgcacatgaatatatatttctttttgatttgcttttttttttgctttctgtgacttaagctatcactcttagattttaatgaacaggatttctgacaacataacaaaacagaaatcaggtttgatgggcttcagcrtacatgaagtgcatatcctctctgaaaaaaattcaagcatgcaacacatctggcacgtttctgtactttgtatccgtctctcctggccaatcttgtgcatttgcgacagcaatgacattgatgaatcgctttaatttaccaggcagtggacaccttgccaaggctatctgtaagaaccagctagagctggtcctgatcatttcagatatgtgtattgtttcagaaaactgtaactgatcagatgcaatttagatgtatcattgcaccacaatcacacagaaatacatattttaataacctctggattttaatttttcttattcccttctccatttttgaaataaagataaataactatataaatatatgctaatttagttatgtggtaaaattaatcatgaaataatttggcaattttttgcattttgaagatgatttagaaattgaatttatataaatgggaattgatttttacaaaacaatattatctttatgtcatttaataagcaaggaatcattattttgacaataaaaaagttgtatcaatttttcacttaaatacttctaacctgaggtgggaaacaggcaatagaatacrtaaaatcctaaactattataagtttccgtggaaatatgcttaatggtagtctaagaaaaaataatcttgggaacattgtggagagagtagataattacatgtaatatgaagaggttatgttctcttgatgcttagagtatatgacagttatatatttttgaaaatcattcagagctaatattatatttaggtagactagatagcttgctataattatgtggtacaattacagcattaaaaaattcagcatatttacagagcacctaccatatgctaagacctgtaccaggcattttcacacataggcagtgcattagacagcatattgtattataacacacaagcaggatctggtgtcctcgaaacaaacgtcttcgcttgtcattttttgatattgatacctggaattctgatcaaacctcaaaacataaaactttcatcactattaaaatacaaattgtatctctatttcttaaaaatatatatttattctttcagggaattattacttgagtctttaataacatctaccctttggcatgaatgattactgtataatgtctgctgtaagcgagctttgacagcggaagtaggaatgagtttagatgccttgactatttgaactgatctggtacaggacaaaaactaagagccatatgataaagattgtttatttgttttgcctacattacatatcaagtgggactgatcctggctgcttttattaccactaattgaataaaacataactcatatattagataaatgaaatatttatacctaaatatctaagttattctttgttttttctttgtaatattctcagaatgactcgcatgttttcactctgtaacagtagtacaagcacatcaaattatcaaagagtaaattttgcaggctcaggtracaaagcaagctggtgcatggaaatgatttctggggtggggatattcatgagacataatcttggggcaactctggtttaaagacacagggtcccgtatttggagaggagcgtatttagaaggggtcttcctggggccttctttccttaagaagatgtcttatttctcattagcattttaaaaaagagacctggataaaataattataatttaaaatatacttctatccattcctatcttttgtgttcttataattaattttccttccttctctttcacttcactattcatgccaccacattgaaacatttcctattgttgttagtaggagttatgtgcatagttcacaagatgaaatgttttaatagcattgcttctcttttaaaggcaagtttgggcttggctagatttaggagttgctttgaaaatgtggcttagtgtattgtttctaaatgacaatatgggaattagaacaagggaaggaacagatcacacaatttacgcacgtttattttatagtggaatttttctgttatctaaatttcaaagtgcctttttaatcccttggtactctctaccaacattggttttttaaattttgtttttccttgttttcaatgtatatctttcatattcacatttgcatgaataccttccataattatttcaaatgggaccttaatgaatacaaactctttctgatttcttttaattgaaaatttattgagtaaattatagattcatatgcagttttacatgcagagtttctgtgaaccctttgccaatttcccccagtgctaatatcttgcaaaattatagtacagtattataccctaggtatttactcaatccaccaaacagttagatttcattagttttccatgtatttatttgtatgtawatatgtgtgtgtgtgtttagttctatacagtttttcacatatataggttcacgcatccatcaccacagtcaagatgctgaacagttccagcaccacaagggttcctcctattccctttgtgtaactacactcatctcccttctgttcccccattcctaaccccatgcaatcactgatatattcctcatttctaaaattttgtagtttcaaaatgttgtataaatggaatgatacagtatgtaacctttttgattgactttgcctatgtgttttaaacaattgatatgtatttttttcactatggatttttgtcaaaagactgtaagtatgtgataaaagataatattgattttactgttatagattcagggtaaatttgtacttctttacattttagcatttatggaaattactaacccttcattatttatattgatggagggaccagagacccaattgcatggtacaaaatactacaggctatgaacaagaagtatgtgactgtgggtcagagaaatattgattgcattgatttttaacatggatgattcatgtggacattgatcattggagtgtaatatggaccaggttatctcaagggtgtcccaagtgagagacagaggtagatttggcatcagaatgtctagtagtttaccttatcttgagcctactttatgaccttaatggactgtaactgaagggaatgtgttaaatgtatacactgttaatccagtgatttcagtgaaataattttggatctagaagaaacaatataacgtaaaaaaagtctgtattgcattgaatatgacatgggtcaaagaaacttgctcattgtaggcccaaattacagaatttattttattgccttctcagtttatttgtcctatgggagaggaaataaacaaaaattaattaatattcttcacaattagacctttatgacttcaagaaggtagataatgtctttttcatctttgtatctcagtgcctagctagatagaacatgctcagtaaatatgtgtcgaataactgtagcttatgagattgggaagttgctaatgtaagtgcatattgccctagtactcttttcagtcaatattttcttcatgtgttagtaagagataggttggaatttttagcagcagtatcatacaaatctttagagattttatatttatctgtgtacagaacccagctaatcaatttgagttcattgttagagccccaattcatcagaagacggagaaaaggcagactcctgaggttgacatatgacaagggaatttctatagtttgcattttattcactttttcccaatgcccctttctattatcattgctttgtggggtgtcagtatcacctaacaaacatttgaagtgattttgaagatattgttataaaacagcagttgtaatggattactcrgggtgctgcattgtacaatgaaaataggcttaagtagaaaactgctggctatctagaagtgtcttttgtggcaggaaatattttagatagtttgttcatcacctgtgtttatcgtttgctatcccagtctattataacatattttttctttcaattctctaattattataaagaaatgattacactgtggaacacacataatgattaacacatgaaacacacacgtatgttttacttcacactgatttaagatacattcgatggaagaagagatttctggcttttccacagttaatgtgtaatgtttggcatgtaatagacactcaaaacagatttttttgaataaatgagtggtagtatttgtaatttaaaactgatgcagagggatgtgccagtttcagtactgtaagggctccataaaggcaggatcataattagcctaattcttattagtatatttcttaatgactctgaattttccaagaacccatcagagacttctagttcctggcttgtgtactctagcagctctcagtggtttagtgtgcaggcccttatccctctcatgtatacaacttcccaatcataagacaggcctgtaagatcctgcaaaatttggttctactctttctgcttctacccttcctgagtttaaaatgacttccttttttttttcttttttatttttgagacagttctcactccattgcccaggctggagtgcagtggcaccatcatggctaactgcagcctcagcctccatgggttcaagttatcctcccaacttggactcctgagtatttgggaccaccggtgcacaccagcatacccggctaattttttttttttttttttttttgtagagacaaggtttttccatgtttcccaggctggtctcagactcctgggytcaagccttctgcccaccatggcctcctaaagtgctgggattacaggcatgagccaccatgcccagcctaaagtgactttctgttacctattctaaagttaagaagaaaacaaaaatggaaaaacaagcaacctaaactataacctccactcttgagtgggacagatttctatagatctattatctcatttgagtctcatgacaacctgagaggtgggcattatattatctatttggcaattgagaaaatagaggcttatagaggctatgaaactaggctaatgtcataagtgctggaactagtctttggtcttatagcaataagattctaaagctatacagttaggttattgctggatttgtctctcctrcttttggtatagatcctacttgctctgtctgggccatctctactttttgatctattgctgttttcctcatttttgtctcttttcattccctggagattgatgctttagatatgctactggtttgataacagctttgcttcagtagtggattaaaattggccacagatgctttgctgcttctctcatcaagaagtgggatctatttttcctcctcttgaacccaggagataaacttgtgacttgctttgactaatagaatgtggtataagtaatactatatcagttatgggctttaagaggcctggcagccatcactttcactctcttggacccctaggccatcatgcaatgtggttggctaccctattagagatgctgcaaggagaatgagagagatgcctggttagctagcagttcttccacctagctcagctgaatcaccaggtgtgtgagtggggtaattttggatttcagccccaaatgagtgtgcagaaaactgcttctgcatgaatggcctatgtgagatcagcagaaaagccagcyagctgagccttgctcarattgtaaaatcataagcagatacacagtcatgttaagccattaaatttgggagtgttttgttttgtagaaatagatatctgaaatacccagtgacttacacatttacttcatctccatatactgaagaccgagtgttagtttctatcatacctatgcccgtcccaagatactgggccctcaggcaaggtgaggttctagttcctctaggaaaggcaaagaaatttaagggatatggggtgttaaaattagacaagtgaagatgcagttggtataagaaaattcatatcaactatcagaaggctgcttttgcaagaggaatatagttggttttgagaattcaaggaatgggaagataaaacatgttgagaatccacatatgaataaatatatttaacttcagtgtgatgaagctttctttacaggtgcttcacaaaggggctttggctttccaccttgttgagataygtgactgttgtggaggtgtgcttcttggtcttccttcaagaaagagcttgttcttcagctatgaggaatacagatagatgacaggtcttggctcccaaacctttagaatcctctgcaggattcaagctaaggtcatacttttccagatcatctcccagccaatgactgagcatgatggggtactagggacctgaccatttcttccaatgtaggattcacttgaccagttgtctttttggcagagtgccacatgggttagtcaagacagtgtggaatttttattgcattccctgcattgttctccatgtccaattcttcttaccctcttttttccccccacaaatgtcagatctgccttgtggtctgaaggctttctctgcataaccctttttcattcccctttacctttcctggtgttactcccagcaatctcgtacttctaactctggctcagcatctgcttctgagcaaggtacagttgagagaactaaaatggcaaatctatcagattaatatgatctgtagtttgtttgcttttaggtagagttggataatcattttacaacaattctaagaaaacttagtgtgttttactgcatgagatgccttttgaagtagagaagacatctgtctaaatcaccaactttatactttgggaaatctgtgttttttgccgaattgcaaaattgcattcgtcttatagtccttaaaatttattttacttcctaatatttgtaactacacagagtcatttgaatctgctaaacatagcacaaaaggtggatatacatcagtatttagtaaaagacatctatttaaattaagcaccttgcaacatgtattcagctatgaggaattttccgagcaagtagcattaacattgaaaattattatagagcttatggggggaggagccaagatggccgaataggaacagctctggtctacagctcccagcgtgagcgacgcagaagatgggtgatttctgcattttcgtctgaggtactgggttcatctyactagggagtgccagacagtgggcrcaagtcaatgggtgcgcgcaccatgcacgagccgaagcagggcgaggcattgcctcactcgggaagcgcaaagagtcagggagttccctttcctagtcaaagaaaggggtgacagatggcacctggaaaatcgggtcacttccacccgaatacagcgcttttccgacgggcttaaaaaacgccgcaccaggagattatatcccgcacctggctcggagggtcctacgcccatggagtctcactgattgctagcacagcagtctgagatcaaactgcaaggtggcagcgaggcttggggaggggcgcccgccattgcccaggcttgcttaggtaaacagagcagccgggaagctccaactgggtggagcccaccacagctcaaggaggcctgcctgcctctggaggctccacctctgggggcagggcacacacaaacaaaaagaccgcagtaacctctgcagacttaaatgtccctgtctgacagctttgaagagagcagtgtttctcccagcacgcagctggagatctgagaacgggcagactgcctcctcaagtgggtccctgacccctgacccccgagcagcctaactgggaggcaccccccagcaggggcagactgacacctcacagggctgggtactccaacagacctgcagctgagggtcctgtcagatagaaggaaaactaaaacagaaaggacatccacaccaaaaacccatctgtatatcaccatcatcaaagaccaaaagtagataaaaccacmaagatggggaaaaaacagagcagaaaaactggaaactctaaaamgcagagcgcctctcctcctccaaaggaacataattcatcaccagcaacggaacaaagctggacggagaatgactttgacgagctgagagaagaaggcttcagatgatcaaattactccgagctacaggaggaaattcaaaccaaaggcaaagaagttgaaaactttgagaaaagtttagaagaatgtataactagaataaccaatacagagaagtgcttaaaggagctgatggagctgaagaccaaggctcgagaactacgtgaagaatgcagaagcctcaggagccgatgcgatcaactggaagaaagggtatcagcgatggaagatgaagtgaatgaaatgaagcaagaagggaactttagagaaaaaagaataaaaagaaacgagcaaagcctccaagaaatatgggactacgtgtaaagacgaaatctacgtctgattggtgtaactgaaagtgatggggagaatggaaccaagttggaaaacactctgcaggatgtcatccaggagaacttccccaatctagcaaggcaggccaacattcagattcagaaatacagagaacgccacaaagctactcctcgagaagagcaactccaagacacataattgtcagattcattgaagttgaaatgaaggaaaatatgttaagggcagccagagagaaaggtcgggttacccacaaagggaagcccatcagactgacagcagatctctcagcagaaattctacaagccagaagagagtgggggccaatattcaacattcttaaagaaaagaattttcaacccagaatttcatatccagccaaactaagctttataagtgagggagaaataaaatactttacagacaagcaaatgctgagagattttgtcaccaccaggcctgccctaaaagtgctcctgaaggaagtgccaaacatggaaaggaacaactgataccagccgctgcaaaatcatgccaaaatgtaaagaccatcgagactaggaagaaactgcatgaactaatgagcaaaataaccagctaacatcataatgacaggatcaaattcacacataacaatattacctttaaatgtaactggactaaatgctccaattaaaagacacagactggcaaattggataaagagtcatgacccatcagtgtgctgtattcaggaaacccatctcacatgcagagacacacgtaggctcaaaataaaaggatagaggaagatctacgaagcaaatggaaaacaaaaaaaggcaggggttgcaatcctagtctctgataaaacagactttaaaccaacaaagatcaaaagagacaaagaaggccattacataatgggaaagggatcaattcaacaagaagagctaactatcctaaatatatatgcacccaaaataggagcacccagattcataaggcaagtcctgagcgacctacaaagagacttagactcccacacrwtaataatgggagactttaacaccccactgtcaacattagacagatcaaygagacagaaagttagcaaggatatccaggagttggactcagctctgcaccaagcggacctaatagacatctacagaactctccaccccatatcaacagaatatacatttttttcagcaccacaccacacctattccaaaattgaccacatacttggaagtaaagstctcctcagcaaatgtaaaagaacagaaattataacaaactgtctctcagaccacagtgcaatcaaactagaactcaggatgaagaaactcactcaaaaccgctcaactacatggaaactgaacaacctgctcctgaatgactactgggtatataacgaaatgaaggcagaaataaagatgttctttgaaaccaacgagaacaaagacacaacataccagaatctctgggatgcattcaaagcagtgtgtagagggaaatttatagcactaaatgcccacaagaggaagcaggaaagatccaaaattgacaccctaacatcacaattaaaagaaccagaaaagcaagagcaaacacattcaaaagctagcagaaggcaagaaataactaaaatcagagcagaactgaaggaaatagagacacaaaaaacccttcaaaaaattaatgaatccaggagctggttttttgaaaggatcaacaaaattgatagaccgctagcaagactaataaagaaaaaaagagagaagaatcaaatagacgcaataaaaaatgataaaggggatatcaccaccaatcccacagaaatacaaactaccatcagagaatactacaaacacctctacgcaaataaaccagaaaatctagaagaaatggataaattccttgacacatacactctcccaagactaaaccaggaagaagttgaatctctgaatagaccaataacaggatctgaaattgtggcaataaacaataccttaccaaccaaaaagagtccaggaacagatggattcacagctgaattctaccagaggtacaaggaggaactgataccattccttctgaaactattccaatcaacagaaaaagagggaatcctccctaactcattttatgaggccagcatcatcctgatagcaaagccgggcagagacacaaccaaaaaagacaattttagaccaatatccttgatgaacattgatgcaaaaatcctcaataaaatactggcaaactgaatccaacagcacatcaaaaagcttatccaccatgatcaagtgggttcatccctgggatgcaaggatggttcaatatacgcaaatcaataaatgtaatccagcatataaacagaaccaaagacaaaaaccacatgattatctcaatagatgcggaaaaggcctttgacaaaattcaacaacccttcatgctaaaaactctcaataaattaggtattgatgggacgtatctcaaaataataagagctatctatgacaaacccacagccaatatcatactgaatgggcaaaaactggaagcattccctttgaaaactggcacaagacagggatgccctctctcacgactcctattcaacatagtgttggaagttctggccagggcaatcaggcaggagaaggaaataaagggtattcaattaggaaaagaggaagtcaaattgtccctgtttgcagatgacatgattgtatgtctagaaaactccattgtcttagcccaaaatctccttaagctgctaagcaacttcagcaaagtctcaggatacaaaatcaatgtacaaaaatcacaagcattcttatacaccaacaacagacaaacagagagccaaatcatgagtgaactcccattcacaattgcttcaaagagaataaaatacctaggaatccaacttacaagggatgtgaaggacctcttcaaggagaactacaaaccactgctcaaggaaataaaagaggatacaaacaaatggaagaacattccatgctcatgggtaggaagaatcaatatcttgaaaatggccattctgcccaaggtaatttatagattcaatgccatccccatcaagctaccactgactttcttcacakaattggaaaaaactactttaaagttcctatgaaaccaaaaaagagcccacatcgccaagtcaatcctaatccaaaagaacaaagctggaggcatcacactacctgacttcaaactatactacaaggctacagtaaccaaaacagcatggtaccggtaccaaaacagagatatagatcaatggaacagaacagagccctcagaaataatgccgcatatctacaactatctgatctttgacaaacctgacaaaaacaagcaatggggaaaggattccctatttaataaatggtgctaggaaaactggctagccatatgtagaaagctgaaactggatcccttccttacaccttatacagaaatcaattcaagatggattaaagacttaaatgttagacctaaaaccataaaaaccctagaagaaaacctaggcagtaccattcaggacataggcatgggcaaggacttcatgtctaaaacaccaaaagcaatggcaasaaaagccaaaattgacaaatgggatctaattaaactaaagagcttctgcacagcaaaagaaactaccatcagagtgaacaggcaacctacaaaatgggagaaaattttcacaacctactcatctgacaaagggctaatatccagaatctacaatgaactcaaacaaatttacaagaaaaaaacaaacaaccccatcaaaaagtgggtgaaggacatgaacagacacttctcaaaagaagacatttatgcagccaaaaaccacatgaaaaaatgctcaccatcactggccatcagagaaatgcaaatcaaaaccacaatgagataccatctcacaccagttagaatggcaatcattaaaaagtcaggaaacaacaggtgctggagaggatgtggagaaataggaacactttgacactgttggtgggactgtaagctagttcaaccattgtggaagtcagtgtggcgattcctcagggatctagaactagaaataccatttgacccagccatcccattactgggtatatacccaaaggactataaatcatgctgctataaagagacatgacacgtatgtttattgcggcattattcacaatagcaaagacttggaaccaacccaaatgtccaacaatgatagactggattaagaaaatgtggcacatatacaccatggaatactatgcagccataaaaaatgatgagttcatgtcctttgtagggacacggatgaaattggaaatcatcattctcagtaaactatcacaagaacaaaaaacccaacaccgcatattctcactcataggtgggaattgaacaatgagaacacatggacacaggaaggggaacatcacactctggggactgttgtggggtggggaaagtggggagggatagcatggggagatatacctaacgctagatgatgagttagtgggtgcagcacaccagcatggcacatgtatacatatgtaactaacctgcacattgtgcacatgtaccctaaaacttaaagtataataataataaattaaaaaaaaaaaacaaaacaaactggccttatgaaccttagaccaatcttgagggtataaaagccttcgcastgaagtggccataaaaaaaaaaaaaagagaaaattattatagaaaaagcagtagaaatcatggtgctgtttattatcatttgaaaagtatttttttattttgttctattaatatgtttcaatatgaatgatgcactgagatcttggataattagcacataacaacataaataataaaaatcatttattggacacaattaaattatgcctttcttacatacgttgtttctattaaaatgtgctgaaatttacttcttaatcttgagatgtaataaagtgttttaaggttacttttaaaaataaacatttaaaaaatgttgtgcttatatgatatcaatggaaaacaaatacttttgaggtttgaaattttaaatccgaaaataataatattaggcagcctttgtatttccagacctcttgtatttatacagggggatctagggcaaaaataattgctgaaatttaacatttatctgggtgggcctctgcgtacctcagcctctcttattcttttttttttttttcttttgagatggtgtctcgctcttgtcacccaggctggagtgtgrtggcatgatctcagctcactgcaaasttttgctccctagctcaagcaattctcctacctcagcctcccaaatagctgggattacaggtgcccgccaccacgcccagctaatttttgtatttttagtagagatgaggtttcactacgttggccaggctggtcttggcctcctgacctcagatgatccgcccgccttggcctcccaaagtgctaggattacaggcttgagcgactgcgcctggcccaacctttcttattcttttgaaaatgcttctggagtccattgatacattctgtgagacctggtgggaagaaataggcctcaaggcacactgagtttttgagttgccctctacrtttttcaagctgatcattattgagtccctattatctgacagatactctgctaagttatttatttaaattatctcattaaacattatcacaatcatattagatggggactgttattatttccatcttatacacaataaatttgaggcatagagaggttaaatttgagcagtgtcactgtaactcacttttaaaaactgtgtgataattaaatggcagtccttagttttaacccagttatggctggctgtaagttccatcccgtcatgaccattatgtttcctcaacttttctattttcctacttcctttgctstgctctcagtcrctgggagacgaaagtgctgctggttagcacagaagaaactgctgctgctgcggcttctactgttgtctgccatctctgttaccatcgagaccggggctgtgtatgctcgaggtgcagggagctaatgtataaggagttaaatgaactcttgctgctgccaaatatgttgttatcactaactgcaccgctgctgtcattagtgctgctgccaacactgcaagccctgctgctgccagtgccaattctgctgatgccttgggctctccatgtcccagggtgattccatagacaagcagctgcttttagatttcacttgctcattacctgtagatcctttgccttaggactcaagcttaagcccatgaagcctgggatagaagacaattggaggtatgttttatcttctctagcatctgggacaactggccttgaaccaaacatgtgcacctcgtttttcttttcccttcttcctctgagatttcttttcccakaggctcttatttcatgcaatgatccactagccctggaaacaggaacataaacactcgaaccctagaatgaacataatttagtcttaactacattagatattttagtttgaaagaaatcactcacatttcataatcctgaaacatataaatttatacttagttatctgtgcaaaaattgaatcatgataattattaaagaattactatgcaagtgtaaatagctttggtattaaccaagagtggtttcagtgtgcttttgtaaaaaaaaaaatactagagttcaaaaattcaggtctatatttgaagctctgtcaataattcrtatacctcatatcaaaaagcttaccaagggacaagatgattttgttagtgggagtggtttactttttacttttgcttccaaccctaactcagaagaagggcaatagtctatcaaacctggaaaataagaaaacagcattcaaatttacaaagctctatttactaaaaacatgcaaaataagtaatttttttttgagagagtgtctcattgtgtctcccaggctggaatgcagtggcatgatcatggcttactgcagccttgacctcccaggctcaagacatcctcccaccttagtgcccccaagtagctgggacttcagatgcatgccacgatgcttggctaatttttaattttttgtagagatgttgctcacgctgctcttgaactcttgagctcaagcagtcctcccgctgtggcctcgcaaaatgttgggatgacagccgtaagccactgcgcctggctaaaataaagaatttttaactggaggaaaagaatcttatgttgttgaattctttattgtcttaactgaaagcaaaagcctgtttgaacttttttcttaatcgagaaaagcatatgaggagaaaagagctctaagttctatgccagatgcttacaaaacaaattgtttaccagtagtttagtgggacagggggtgggggtaaaagaaaaagttgtattaaaatcttgatgaagatattctgcatcaaggactattttatttttcttaagggcgaaacaatctgttttcttatttgaggccagtgaaagtttatatttctattccacctgggataataacaattgagagttttgtgttttattttccctaattgagaatatggggattggtaaataatatggtaagtaatttgcatttagaataaggtgaggttcttggttttccaaattattgatttgtggagtgaatttgcatctaggactctaattttttttttcagtaaatttcatgagaaatgttattgtttttaggaatgtaattttattaaaaaatttgcgggaattttgggatgtatttatatttaaagttatcataacatgttagatgttgtcatactgtgtgtgtatatgtgtatcctatatgtgtgtatgtgtgtatatttagcacgcatttttctttttatttgattaggttttcttaattttaaagttggaatgaaagaaaaatgtgttagtatatgattcataaaaaacaaaccagtgatggtactgtgtttaaacatctcaatatggatatgggttttgttatattttgcgagctacatgccagagtatattgtaaagaagtctatttataggtaaaataaagatgagaaagcagtgcagagagaaatcaaatataattgtcttacatttctgattctccttcatttttagtttttaatgggaatttctgtcttttatctgcatgaagatgctaatgttctcttaatgtacttaaaattgtagagtaagaatttcgaaatttgtaggaagacaaatggcatttataaatattagagtttatgagtacttaatatcccctctgtcatctgcatttaatgttttcgtttccttttaacagtatgtgtaagaactttctgtgctgtgcttagagtttttttcctagataaatgtttttcttatgctgtaaacctgtttaaggagatgagatttgaaagtagttgaattcagagctcttacttgagcagagtgtttctcaatagcttttccaagaaaattttaaaagattaaaatcaattttaatctttgtcgtataggccacagaaacttccattcatacatccttagaaaattaaaacaaggcaaaataacaatttgggaaataatcaattaaaaccataactatatgggaagtctttggaaatggaaggcccacaacctacctatatatgaagccagtgttgtctgaactgaattctaccgtagggtggactttttcttaacgtctgaatttatgaacctgtgaaagaggaacgttaaattgaaaataacgacaacatcttaattatggtgattttactgaaagactactaccataataagatgtattctaggtttccagagtagtggcagctgtcaaacaccaacatttctccctgagaataggtttagtgtagtgtgtttttcaaggacaagttgctcagtgagccctgctagttaatattcaacagttttcttaatcaaaattgtggtcttgctccctagagtgtttgtgaaaatgattgtatgtttatccgagccttcaacagcagaaagagaattcttgggctaggtgctggtaatgagaacctatattaatcccagggtgctgataagaaaaggaaaatcctgtcagaatacattgtttgtaaaaaaatgattactgtagctcaaaaagtcaaaccttttttttgaagcccttgtaccttatataacttcagttgtttatctgggataatggggaggtaggggtatggtgatgtccagcaatccactccaggaatggtattttagtgatcgagtagtctggggttctgttaatcattgcttctgttgcataccttattaagggtcctcacatgattcctttagattacaagaaggtcttaatgaagtaaagcttgtgaggtattagagagctcagtctggcattgtacaaatggtattgaagactcacataggaaaaacaagcttgccaaataaaataatgcaacagctaacattttctatgaaatattttgcttaggatgcaggttttgttagtgcttttgtttttaaccctaaactgttttctactgtcaggtgatactgcccttgaaacagagctgtcctggttgaatgtgacttttttctgccgtgggtacctatcacttccttctcacaccccctcaactcgtgcgcacatacacacacatacatctgaaagaatcaagatgaacagtttgaacaatatgatctctgtaatactataaagaacatttacttttggattttgttttgttttgtctgtaatggagctctataggaattaaatcttctgaaaacagtctttttaaaatattagcttggtggatttcttctagcattaatttttttttttttgagacagagtctcactttgttgcccaggctgcagtgcaatggcatgatctcggctcattgcaatctccatctcccaggttcaagcgattctccttcctcagccttctgagtagctgggattacaggcatctgccaccacacccagctaatttttgtatttttagtagagacggggttttaccatgttggccaggctggttccgaactcctgaccgcaggtgatccgcctgcctgggcctcccaaagtgttgggacaggtgtgagccaccgtgcccagccagaaagttttagtcaataacaaaaacacattttttgagtagttgtttaacatgattaaaagcacacttggactttaattaggaaacaataaacatacatcccataggagttaatctttgtaaacaacaccaattttgaaggctacagtcagttatattgatcacttcagtgatactgagacatatactgcactttatgcattgatctttgacatagaaagatcagcacgttaatgtaaaaaattgccactatgtatttgaaatttaagccctactattagctaatattcaaaataactcatttacttgatactgtaatgtgtagtcaactgatttttccttttaaatagattgatctgttatatatatattagaggcagagtctcactctgtcacttaggctggagagcagtggtacaattatggttcactgcagcttccaactcctgggcacaaacagtcctcctgccttagccaccactatgctcagctaattatttttaatttttttttgtaaatgtgggctcttgcattgttgctcagtctaatctcgaacgcctggtctcaagtgactcctgcttcagcctcccaaagtactgggattataggcacgatcctgcacctgccccaattctgtatttttatttgttcttagttgtagcttgtaattatttccaaatgtgaatcataatcagattgattcaataccaagttttagaagaattgtgtatcaactagtccactttgaagaggaaaaccacatagtaggttaaactagtgagtttaatttaaaaatattattaaagtatgacaaaagagtaacttctctctaagatatagagaaacctaagtggtaccctgaagctaaaggagtgtaaccaaagaatgacaaacttggaagaggatcagatcttaaagagaaggtgtaattcatctcactggasagcagagaagttttcgagtttggctgagcatccagagatggcccatagtcatggggcaagctggcggccagtagaatagtcggcatggataaccaaaccagtggctatgtttcagaggacatgagcaccctccagggaagagtatggggcctgtagtggactcagtaggactcaggaggactgccagaggggagggggcttcaggtagatggcccatagccctacagagggaattctgactctgatgggcatttctttctggagaaggccttgggaagattgtctctagcttgagactgcaagattggcaagcaaccacacgttcttataccctgcatggcttggcagggctacactgaatgtcctcacacctctacccaaatcactgactcctgtgtcaccagaagtcatggaagagccccttcctcctgcagtgtccctccagcttcctctactgggaacactcagcatcacacccattgtaaagaagaaatacttaaaagaattctatctatgatcataggacatatatttgtggaaaagtgcatttggagctgggaggcaattaattcataactagcacacattgccttacatttaggtgctggttatagctaatattgtggcaaaaatgacaactctaaatgccgtaagaatgtcatgttgctttcaggtgcccaattttagccccttggacttgtccatctggattagtcacattatcctagttttcagtagctgatcttaggcctgtgcttatttttcaccatatccttcaaagacaccacctatagctctctgcagtgggaatgaaagcctgtctacatataccactgtaaatatgctcaaattctttgagtgtttgagcagctttagtcaaaggaattcatggtgtatcaatagactctattctaattaaaaccatttaaatcacttttataagcaagtgaggaaactgtttagccccagagtgtgcactagtaatagcacatagttcatttcacaaagctaaagagcaatattgatgatagggcactaaggagcatgcgagtgcatagatcaatttgttactagtcagtcattgtttttctctgttattagtacaaccactattgtggtttaggtgagaaaatgttattagtgactgctttctggtgctttataggtgctatcatttactttcatgttcatatactgttgtaatcatgtatgaatgagttgccaactattatatattatgtatacgtaagagacaggtaaagaggtgcatgccggtatcaaatatgatatttacaaagatacatattaataattcctagataatggtggtttattatgaacgacagtaacagctagatggtaaatcattcacaatatttatgtctattgttgctttaacataggaattaccaatggcaatcacattttattttcctagcagccagaacacttttgttatacatcatttattctttcttaaaagaaaaaaaatcctttctagaaacactgttattcctttgacaatttgctttggatttgtaatctttccttagggtgttatttttttttctttagggaaaagaaggaaagggatacacgtggttaaaaaaatgccaacatgaataaatccaacagataaattgttagcaattacatttttaagagtgttgcaggagcattaacattgagaaactaatacttaagtacaaatggtttaattgtaatatggaaaataggtgatgctataaaaactattatgattcatatctataaaattagtaatggaatgattataggacaagaaatatgctttggtatgaaattgtattctaagaatcttctatcatcaaatctagttagttaaatctactaaccctgaatttaagatctgtgaatgaatttacctttatctaccatgaaaataacaaagcataggctgggcgcagtggctcccacctataatcccagcacttttggaagccgaggtgggcagatcacttgaggtcaggagttcaagaccagcctggccaacatggtgaaatccggtcttactaaaaataaaaaaaattagctgggcatggtggtgcatgcctgtaatcccagttacttgggaggttgaggcaggagaatcatctgagcatgggagacggagcttgcagtgagccgagattgtgccagtgcactctagcctgggctacagagcaagactccgtctcaaaaagaaaagaaaagaaaagaacaaagcataaatgtagtggacctaggagtactcttaggcactattcccaatgttaaggaacttaaaatctgtagcttttaaactgttgatattttttatactatagtacgaagaaatgtacaaaataattgagtcaaaagtatacaatttatttagaacaaaaaagcatatgaaaaggatgatgataataaatgagtgtattgaagagataataaaatgatggacaagaacatgaacctagtgaacaatgtagtaagctatcagttagcagataaccacaaaatgcatcatttccatggctctgtgaaaactaagcttacaaaaatgatttttcccctttggttataaggataacaattaattatagagcacgtttattgagtgtccactaggtatgtgactgatatgcacacaattagttgtttttactgatcgtttcactaagatacaaattattcaggacctgttgtaagttttaaatacaagttcaaacaccacaagggacttgcacaaggtcatacagccaaaagtaatgaacagagatacaaatcttagattgcacatcctcaaagcccaggccctttctactacatagtgtggcttctaaaaattaaaaatagtgaaactgcttggttcttgatgtgctggggacttgataatttcataaattccatgtggaatttaaagactgaatattcagctagttgatctctctctcttttctctctctctctttttttttttttttttttaaaataggatcttggtctcttgtccaggctgaagtgtagtggtgtggtcatagctcactgcagcttcaaactcctgggctgaagtaatccttctgcctcagcctcccaagcagctaggactacaagtgcacatcactatgccagtcctgtttttatttacttatttatttatttactatttttttgagatggagtctcgctctgttgcccaggctggaatgcagtgggacaatctagactcactgcaacctccgtctcccgggttcaagcaattctcctgcttcagcctcctgagtagctgggattacaggagcgtgccaccatgctcagctaatttttgtatttttagtagagatggggtttcaccatgttggtcaggctggtcttgaactcctgacctcatgattcacctgcctcrgcctcccagagtgttgggattacaggtgtgagccacygctcccggccatgtttttattttttattttggggaggtggggggtcttgctttgttgcccaggctagtcttgaactcctggcctcaaacaatcctacagtctcaacctcccaaagcgctggggttacagacatgtgccaccatatcagccctcagctggtaatttccattacatatatagtcacttgactttcattatgtttttccctaaagtgcatacacaggtgaaaacgaaaatgtgacataaataagcagggtgaatatattataattttttaaaaaattattacttctcttacaagtgggaacctttttttttttcgctgttgtagcattcactggtattttcctgttaacctcttggtacacataacaaaaattaagtgtgtttatttcaacgttatgacttatttatagattcttattaaactttgcttcttaactagaatagaaatgaaaataattatcacaatagtgaataatcccttttgttttctgttatctcattataccaatgaatattttgagtattttgaggattatttatcatacttttccaattagaaaacgagtttcttaaagattgtattattttctcttaatgagagaggctgcacacagaggttatttaacagatattgtaggttaaacatctgactattgtgagtggagagaaaattatgagatagagttttgctaaatgtaacaagtaagatgcttaatggactcatggagtttctaaacttggcaagatgagtctgttttaataggcaaatttaccagtttagaataagaaatattacattctcatcagtaagtgccctgacaaatggtccagcattagaaacatttatcaattgttttaataaggaactgttgtgatattatcaggcagaggttaaatgctttgctagaaagacctatgtattagtctgttctcacaatgccataaaaaaatacctgagactgggtaatttataaaggaaagaggtttaattgactcacagctccacatggctggggaggcctcaggaaacttataattatggcagaaggggaaggggaagcaaggaccttcttcacgtggtggcaggagagagaagtgaggatgcaggaaaagctgccatttataaaaccatcagatctcatgagagttcactcactattatgagaacagcatggggaaaccgcccccataatccagtcacttcctaccaggtctctccttcaacacctggggattacaattcagaatgagatttgcgtggggacacaaagcctaaccatatcagtctaaaaatgtatatgtcataaaaattgcttagaaatatgtttagaggtatcatagacaggtgaatagaaaatgagctttagagtcacacgaccttggtttgaattccagctctgtcattagctctgtgaatttagccacagagtaatctcattaagatgtttcttcacttacaaaataaaaataatactatctcttcatgtaaggtttttatgaggattaactgtagtaatgaataaaaaagtaactggcatcaaaacgatgcacaacaaatgtagcttcttttaatttgaaatattaaagtgatatatttgatgctgattattgtatgtactggagattatatttttctgaatttttagaaagaaaaatcaagggaattttaaacatcatgaaaggcctacttgttcacacagtttttaaattgtgaatgacatttaaaaaataattttcattatgtttttaggctaaatatgtccaatgctttatagctcttgaaaaaatttagcctgatttttgttgctgttcttttgtggtgtaattagtgtcctcagctgaaacaaggtgctggtagctgaccccttctctaaggtcatggtaggatctttaggcttccttcttataagtcacagaggtcaggaaaaagacattattgttgggttggacttatcgcatgctcttataacagcccattgttagtgtagaattaactacagagtttttatttcttatgtcttgtaaaaatcagagcacttttgtaaaaatgacgattgaacatcaaggtaacctttatgttatatttccaaatgggtacatggatctatatatgaagaatttttagttgaaacagtttatagtgtttctgtttttggctctataactgacttccttcagaccaacttcatatactctctccttcaccttctggtgtttgtgaaacaaagggtgaaaaggacaagtgcagtgatgatttttagctcaaaatgttgggcttttctatctaatttagttgtccaagaacacattataaaatatttgcaaccacaaggaatctaatagcctaagaaaagtgaaaaaaaagcagccttttgtgtgtttgttttctccttagggaataactataaatggaaattagagataagatagttaatattgttctgtaaatattcagtcatcctgaaatagtcacgcctgtcataggagggagaattattatttactaggattacaagccagttgatcaactgacatcctgtggctaattgtggattggtatttcaaagataatgtagtctttattaagcatctgcaattttatagttacatttcacacattaccattttgatttttagcaacattttgtccttaaaaataatgtgtatgtgtgtgtgtgtattcctcattttacacatgaggtaattaaggttcagacaagtcaaacttttttcaaggtcgtacagttaaaaagtggcaaaatcaaatttcaaccctgtttggtttgattggtttgttaacatgtgcctttgtttctgtacttatcatttttagtgccttgctgactaaaatacaaagtttactcatttttatacaattcctcttatttttaggagatacaaataaaaacactgtagttaattctcaactaacaatggactactataagagcatgtagtaaacccagtccaacaagaatggcttttgtcggaactctttttctcctgttctcagtaaaaatttattgcttgaaatgtttattgagtctctgctggtgcttggtattctatttcactgctgggtacagcaatgaaaacagatggatgcaatccctgctttcataaagcatactttctaattcccaacatatgtacctatgataaagtttaatatataaattaggcccagtaagagattaacaataactaataataaaatagaacaattataacatctatgtaagaagttatgtgaatgtggtctatttctttctttcaaaatatcttattgtactgttgatcttagctaacctcactatagggtttttttttctttctttattaggttgagaactttcaccttttcacttaaaggaaacactttgcggcttctctttgacatatccaaatggccagcatcacgggggccattattaagtaaaaaaaaggttctttgaacacaagcacagttgatatgataacctactcagctacaaaatgactaaagggcaggtagcgcctacagcatgaatctgttggacaaagggatgattcacatgaggaacaaagcaggatactgtgagatttcatcatgctcctcagaatggcatataatttaaaactaatgaattgtttatttatggaatattcaagttaatatttttagattgccattggcagcgagtgactgaaactgtggaaagcaaaackgcagctccatcccatagcaaacattaggcataaaatctttatcaaattcttatctcgtacagagttgaggacaggtaaaagggaacttgtcgtagttgttgatacatcctggttgctatgtgaataataattcacaacaatatcggaataatatagatagaaaatataacaagaaaatatattgaagaaaacttgttgtgagaaatgcagtgaatattaaagtgactgacttttcacaccatcagattttattttaaagcataattttccatagaattaaactaatcagttaatgtaaacatgggatttttagtttgaaaactgagaaagtattacagatcatttaaaattagtactgctactttgaatttggaaaacatgtttctataccaagagagaatggaagcgaccatcttagtataatgtaaatccagactaaacgtataattaggaatatataataaattacgtatttatagggagatatctgggctattaaatgaattctacagttattttaatatatagtcagttttatatatattatatatgaattcctcytttgcacttcttttatttttagactagctggttcttatttatggttytttttgaaaaaagcatttttgatctgatctttagaatgaagcaatttcccaacctgtagtgaaagatattatttaccataaattttccagtattgccaatatatcttttttgggtcaaaaaatacgacagagacaaaatttaaaaattatttcagctgtctacattcattaaataaaatactggcaggagttgtatattatattagtttgaataagttgggcaaatatatttagctatttctttgattagatttataggtttcaaagttctatatatgcatgtgttgaaaataaaacacatggtaaattggtaaaggactttagaaacaagtacatataacactggcagaaggaccttgtctctcttgcataccattgttttcctagggcgtgtcacacaacaggtccttaataaatatgtattgaatgaatgtattaaattataaaagtaatgatgaaaagctggacataaaaaatttctgatgataacttcacatgcattagcaggttcttaatgtcacttgactgtattccttgcttctggcttcctaagtgggttttgctttgctggtcctgtactacagaccctgcctctgaatcatgacacattttgtcagtaatgtacacatcagtatgtagagagcttcaaaagcttgggcacttaacactaaccttctgctcaggtccttaggtaaatgttgggtatgcgccaccattaaataccctgtaactctccgatgctacttctctgctacatcttgtattctaccaaggtctagaggagggtggatttaaatgatcaattttcttagcattgactgatttatgtgtagaattttagatttttttttttttttgagacggtttctcactctgttgcccaggctggagtgcagtggtgtgatcaccgttcactgaagcctcgaccttctaggcttaagcgatcctcccacttcaccctttcaagtagctgggaccacaggtgcacgccatcacagtcagctaatttttgtgttttttttgtagagacagggtttcaccatgttgcccaggctgatctcaaactcctaatctcagacgatccgccttggcttcctagaagtgctgggattacatgcatgagccacaatgcctggccagaatttttaaaatcttaattatttttgttgagtcatagactgcagtagcaaatgtctagattataattacaggaaaataaaatcatttgtggcaaagacatggcatacttctttttaattcctcaaatagtactgtattccacagccctactcgtatataacccaccagacaagaaagctgatctgtgtaacaacttgaacttcttacttgccatgtttaaaaagggaagaccatcgactagagacaggggtggctacctttagagattactaattttgtcaatgcaaagcttgctaggataacagttgataatatcaaattgcttattaatagttttatcaggatgtaatttacatgttaaacaagtcaaccatttaaagtatayagttcaatgattttttagtatattcacagaattgtgcaactcagagtaaattttaaaccattttcattacccccaaaagaaatgcaattcttattagcaatcacccacaatattctccactctctcccagccctgagcaactactaatatattttctgtctctatagatttacttattctgaacacttcatataaatagaacatacaatatgtggtcttttgtgactggctcctttcacttagcataatgttttcaaggtgcatccatgttgtagcatgtatcagtactttattccttttattgctgaataatattccattgtatggatctaccacatgtatttttttattgatccattgatgaacatttgagttattttcactttttggttattatgaataatgctgctatgaacattcatgcgcaactgccaacatgtttttcaacacacttgcaccattttatatttccatcagcaatgcaggacgattccagtttctctaccatctggagaacacttattaatatcaatctccattattataaccatcctagtgggcataaagtggtgcctcattgtgggtttgatttgcatttccttaatggctaattatgttgagcatcttttcatgtccttggggtcatttatatatcttctttgcataaatatcgatttagattctttgccttttttaaaaaaattgggttgtatttttgagttgagaggtccttaaaatattatagataatttgttattagatctatggtttgcgaatattttcttccattctctgggcttttaccttcctgatggtatcttttgcagaacaaagttggtaattttgatgaagtctaatttatttatatgcttacttttgcttatacatttggcattgtatctaagaaggttttgtttaactcaaagttgttaagatttactcccattttcttctaagacttttatagctttagcacttacatttgggcttaagatctattttgattcactttttgtgtagagtgcaggaaaagaagttaaacttcattgttttgtccctgggtctgggaccatctgatgaaaagacaattctttcctccattgattttccctctcacccttgttaaaaatcacctgaccaaaaatataagggctatctgtactcttggttctgttccactgctttatatatctgtccttatgccagtatcacagtgtcatgattactgtagtttggtagtaagttttgaaattggaaactgtgtgttcactaactttgttccctttttcaaaattgttttggctattgtggcttcattttcatatgaaatttagcagcagcttatcaatttctgcaattttaaaaaggcagttgggattttgacaaggattgtgttgaatctgtatcagtttggggtgatttgtcatctttgtaataacacgtgttctaatcaatgaccatcaaatgtcttcaatttctttcaataatgttctgtcattttcagagtacaagtattgcactttttattaaacttattcctagagattttttcttgtgaatgctactgtaaatggaggactattttcttaactcatttttagattattttctactgtatagagatacaattgattttggtgtattcatcttgtatctgtcaaccttatcaaacttgtttattagttgcaatagtttatttttgtttgtgtatgtgtatktgtgttccttaggaattattaaaaatataagatcataagatcattccctttgcaaatagaggtacatttatttctttttttctaatctggattcctttattttatttaagtgttataaatttttactttttgcctacttgtgctggctagaatgttcggtataataatgaataaatatgatgatattgaacagtcttatttttttctaattttagatgtgaaagcatttggatttttaccagtaggtataatgatagccagggatttttctacacatccttatcaggttgaggagatgttcttactagtttgctgagagtttttatcatgaaagttgtgttggaatttgtcccatgctgtttctgcatctataacagaaacatgtgctttttgttctttagtcgattgatatggtatattatattgattaatttttggacattaaaccagcattagatttctggaaaaattccacttcctcatggtgtatgacctttttattatgttgctggatgtttgctagtattttgttgaggattttatatataaaataataaaagacattgttcttttctttattataggtgtatttagagttttctatttactctgagtcaattttggtagtttacatctttttaggaatttctccatttcttctaagttatgatctgttggaatgcagttgttcatagtattccttttaattcttttatttctgtgaggtttgtagtgatcttttattatttcaaaaataatttgagtcttttctcatttttcttgcttgttctttttaaaggtttgattttgttgatttactgtattgtttttctatgttttatttcagccgtttgtgctgtaatctttattattttcttaattctgctggcttttaagtttcatttggtcttctttggtcagtgtcttaaggtgaaagataatgttattgatgtgagatgcttctttttaaatacaggttgagtatcccgtatctgaaatgcatggaattagaagtgctttggatttcagattttttttagaatttggaattcttgaattatacaggttgagcaacccaaatccaaaaatttgaaatccaaaagtgctccgatgagcatttcttttgagcatcatgtttttgcataaaaactttcagattctggagcatattgtattttcagatttgagatgctcaacctatatatgtttatggatagttatagctctaagcattgcttaagttgcatctcacaagttttattttcttcttcattaatctcaaagtatttccaatttctcttttgatttatttttcttttttaacacattggtaatataagaacgtgttttttactatttatatatttgtaaattttccaattttttattttaagatttttaatttttgtgggtacatatatttaagggatacatgaggtattttgacacaggcatgtaattcataataatcacatcatggaaaatggtacatctatcctctcaagcatttatcctttgtgttacaaaaatccacttatattattttagttatttttaaatgttcaattaaattattattgattatagtgcccctgttgtgttatcaaatactaggccaattttccaaattaaaaaaattaatttttaatgttattcctttgtggctggagaacatatttttgtattatttcattttttcaattgttcaatgtgtctatttctactaacttttaaattttcataatatattttgtctgatattaatatagccatttttgcattcctgtcatttttatttttatggtatagttttactttcttcgtttttgcatcttggaatctaaaatgtggctcctgtagaaggcatactttgaattttgttgtttttatttagtctgacaatctctttttgattggattatttaatacattcatgtttcatataattggtgatatggttggatttgtcatttaactttttgtttggtgtcattttttctccactacagcttttttcccagccaattcctttgtgctattataaatatgttacatttctatatgtcataggcccaacaatataattatgtacatattattgtaaaaaatagcttttaaaatcagttaagaaaaggaatggaaagaaatgtgcaattgtatgtcatactttctaatatgattacctttactgaaattttaatttttagtgggtttcaaattattgttgggtgtcacttgctttcagcttgaagaatttttttagtatttcttgagaagtagatgtgctagcaatgaattctgtttttgttaattaaagaatgtttttattcaacaacatttttgaaagattgtttcaatatgaaatacttgattgagatttttttcctttcaactttgaatatgtgatcccactgccttatattctacattatttttggtgaaaactcagctgttattgttattggggttccttaatatgtgacaaaccatttttctcttgatgctttcaagattttccttagtcttattgttgttgttcacttgtttatctgtttagtgactttgctcaacaactttggtgaagtccatttccccaatgggattcaatctctgatattgttcctaagaggcacaaccgtgggcatgcacacactctggtctttgttctccatcaacttctcaagagatgacagtggattttagttagtctctttttgattgtctctttctttcttctccctattaaatttctagctagtctgcatctactggtatcatatccatctgttagccttcactaattgctagctgattgctccattgtttttgacaatacctagtgcatagattgctctacagtctgatccaattaaatttaggcacctttgcagaggtattttttgaaatgagactttgagacttattcctaccctgggaatgctctttagttgtgtcttttcctggttttatctgttaaactctagcttgcttactgttatatttcttgctttcatgaagctatctgtctcctcttaaatttctcaccatcaaaatctttgttctttacaacagtgtcccaagacttgaacttcccatgccctgtcccaaataaagccagatcttttaggaagacctatagagcattagttccttctggcttgcctcgttctctgggcagtacccctgcaccagtgttccagagctggtggtcaggaagtcgctcacttctctaggaatgacagccttctctaatgagtagaatgcttggcaggggcagtagcctctgttcttgtcaacttgatattatcttgatgttgaacctccaccgtaaacttgctgaaacaaggacattcagggctcagtattatcagccagctatgcctgggggtagatcttccattctatgagtaaggctgagtagaggaaaggaacagggatcatttgactgttcttgcctgcagtggagcttcagcagcaatgggctgggcaggatgagaaaggctggtgatcagctcctcctgggaagaaactgtagccctaaacttgggtctaggaggagacagagccctgtgttcttgtctgtacatgccgatagtagagcttccataaagttgagctgggtaggagggaatgggccatggctcacatgccatagactgtcacttattgagatttatttgattttgctgaataaatgtttctccattttttgcatgtcattagggaaacttcctgataatttaagtggttactttatataatttttacctgttatggttgttcctcctgtagtgttcttagcatttactttcatttactaaaatatctgtatgttttttaaaagtatatgttgatatacatatcaacatatatatcaacacacacacacacacacacacacacacacacgcacactttatgaacatattgattctaccagcatttattctgcttctaccagtaatggtcttctttttaattaaaatggtagtgttttttaaagcataagtcaagcaaaatttagcgcttttcgtcagcaagtaacaattcttttattaaacactattttcaagtcctttttcaaataccatcagaatttccatttattaatttacaaagaaaattataaaaattacatagaactatttgaataagcataaccatatattttttttttctcagagtgatctacatgggaaccacattcacaagtagaaggttgcttggtgaccagggaatctgcgcaatcattaatctttgatgattggaatgattaatgatatcaagccattttgttttgcctgtccttttgcatcttcaccatctctgctctgcatttaataaatatgaatcattttatagaaatacagattgttataaattatggttattttaatcataaggrtagtaattctcaaagcttagtttacagtttgacaatggtaaatgaaaaatttatatgttcacaaaaatattttgcaaacataggatttgtactttctaacaattttcagatatctgtttttaaaataagttttacaaaaactactgattacagaatagatatctagcctttaaatgcaacatattacatagaaattatagttgttgcaatcatccaaagaggtgtaaaaaaaacacagttaaagcaagagaagtctttatagaacagattgccagtagttagtgtacaagtatggtaacacttaatgtttattttcagtgtttgggacattattcactttacatgtataatgtcacccaattgtcacaataggtaggaacttgtcattcactttatagatgaggatactgaagctctagatgtttatgtaacttatctaagctagctagtgatggaactgtggcatttctagttaatgatagaactgtggcatttaccttgcagcctaactctagagttctcactcttactctgccacattgtatccagaagtatgccaaaatttttcttcatcttatataatttgttttcatatttttcacatatttgtaaagagcatgtttattgaccctgttccatgtccatctgaagttctctcttggttatttgagtaatggaggagccaattcctatagtctccattcatgctcaaaatcttcctgcagtctttgtgacctgactcattctttctattacaaaaatatgtaatataaacatgattaagatgaagaggatataatagccaaaatgtattgtgccaggcattgttctagtgtcttgtgtatgttatctcatttaatctatggtaaaattctctggggtgggcattattgacttagtgattaagaaacttcaaatcggagaaactaactgtgcttttggctacacagtttttaagtgttgattctgaattatgcctggtgattctgaagacattgccctttccctgtcatattctaaaatgtttactgagtgctgggtcttacatgccctgtgagtaggctgtcagcagaatacttctctagaggtagttatattaaaaatacattaaggttgagaaactcagaatcagaaarattcattataagatataagtttgcatagttcaccttgagattgctatggcaggttcataaatggattgacaaatgaaaagtgggtcactgatcattttatttactgtagttccccattatctgtggttttgctttccacgacttaagttatctgcagtcaaccatggtataaaaatagttgaatacagtaaaataagacattttgagagagagaaagagggagctcacatttatataacttttattacagtatattgctttgttttataattattattaatctcattgtttttcatttataaattaaattttaccayatatatgtatgtataagaaaatacatagtatttatgacattccgtactatctgtagtttcaggcatccactgcgggggggtcttcgaagatatgcctgatgggtaagagagggattgctatattcactgttatggaaaatagtggtggtcttaacagcagatataaaaattatttgcaaattaacagtatgttaacaaacaaaggaaaggagatggcataaaatatcagtgtcttatgttataaaatgaaatgtyatatatatatatataggtatatgtctatataagcaatgcatcattgctattcattatcaaatactattcatcaaaaatgagtgcttatgattctaggacagggaccttgtatggttcttttgtttttatttataaaacatgacacataaagggcacttgataaatgtttaagggagcaaaaaatattttttggtgtatttaaaagtcaaatgagcaaagcagggatttatgctggtggaaaagagattaattatggtctaaatagcatagcatgctccttgtgttagtccagagagagagagtgccaataggatacagatagatagatagatagatagatagatagatacatagatacatagatacatagatacttagatagataaagaaggagagagatttaacataaacatgtaaatacttaagtaaatgtttatttattataaggaattggctcacacgattatggaggttggaaaattccaagatttgctgttggctgtctgatgacccaggagagtcaattacatagttccagtctgaatctgagtctgaagacaggagaattttgatattgtagctcccagacagtcaagtagaggagtgaattccccctgactcagccttttattctattcaggccatcaagggattggataagccccactcatattggagaaggcaatccgattgattcaggctactgatttcatatgctaatctcatccagaaacatcttcatagactcacagacataccctcaataatgtttaaccaaatacctgggcagtctgtggtccagtcaagttgacacataaaattaaccgccacactgttcagttttcctagctgttaactccaatcatttgaaaggaagcgatctcaaacttaaggttccagactctatagccagataataatttctggtttttataggctgatgactcccattctgtatttaagggctactggtatgacatcacagaaaaataattatttactcatttaaaaaaatatcggatgggcacggtggctcatgcctgtaatcccagcactttgggaggccgcggcaggtggatcatgaggtcaagagattgagatcatcttggccaacatggtaacaccccgtttctactaaacatacaaaattagctgggcgtggtggtgcacgcctgtaatcccagctactcgggagactgaggcaggagaatcacttgaacctgggaggcagaggttgcagtgagctgagatcacgccactgcattccagcctggcgaaaggtgagactccatctcaaaaacaaacaaacaaaaatatcaaagtgaaatatgtgtaagaaactcaaagaatattttaagagagtataataatgttaaaatacacaaagttccttatttatagtttcactttcaaagataaacagtcataatgatttgattttctagccatttttcaatacactatacaattaatagtacatatgtgttagttttattttttatttcaatagtttttggggtacaggtgttttttggctacatggatgagttctttagtggtgaattatgagattttaatgcactcctcacctaagcagtgtacactgtatcaaatatgtagtcttacacccctcactttctttgcaaccatgctgttttggtaactacagccttgtagtataatttgaagtctggcaatgtgatacctccagatttgttctttttgcttagtattgctttggttatgtgggctcttttttggttccatatgaattttaggattgttttttctagttctgtgaggaatgatggtggtattttgatgggaatagcattgaatctgcaggttgcttcaggcagtatggtcattttcacaatattgattcttcctatctatgagcatgggatgtgttttcatttgtgtcatctgtgatttctttcagtagtgttttgtagttttcctttatagttttcacctttttagttaagtatattcctaggtattttattgtttttgcagctattgcaaaagggattgcgttcttgatgtgattctcagcttgatcattgttggtgaatagcagtgctttgtatacattgattttgtaatgtgagactttactgaatttgtttatcagatctaggtgccttttggatgagtatttatggttttctaggtatatgatcatatcatcagtgaacagtgacagtttgacttctttttttttcccaatttgtatgtcctttatttctttctcttgcctaattgctctggctaagacttcctgtactatgttgaatagaaatggtgaaagtgggcatccttgtcttgctccagttctcaggggaaatgcttttagctaagatgttagctgtgggtttgtcatatatggcttttattactttgaggtaagtcccttctatgcctattttgttaagagtttttattatgaagggatgctggattttaccaagtgcttttcccttatctattgagatgatcatatggtttttgttttcaattctagctatgtgatatatcacatttattgacttgtgtatgttaaaccatccctgcatctctgwgactaaactcattttgtcatgatgtattatcattttgatcatccaccagctgttggatttggtgagctagtattttgttgatgatttttgcatctatgtttatcagtgatattggtctgtagttttctcttttttgttatgtcctttcctggttttgctattagggtggtactggcttcatcgaatgacttagggaagattctctctttatcttttggaakaatttcagtaggattagtaccaattcttctttgaatgtctggtagaattcaattgtacatccatctggtcctgtacttcttttcactggcaattttttaaaattattgattcagtctcaccacttggtattggtctgttcagtgttcctgtttcttcctgatttaatctaagagggttgtatatttctaagaatttatccatttcctctgggttttctagtttgtgcatgtaaaggtgttcatagtagacttcagtgaacttttgtatttttgtggtattggttataaaatcgttgactttctgccttgatgatctgtctagtgttctgtggagtattgaagtcttccactattattgtgctgctatctcatttctttggtccagcagtaattgttttataaatctgggagctccagtgttagttgcatataggtttaggattgtaatgtcttcttgttggactgctacttttatgatgatataatattgttctttgtcttttttttactagtgttgccttaaagtctgttttgtctgacataagaatagctactcctacttcttctggttttcatttacatggaatatctttttctatccctttgaccttgagtttatgtgaatgcttatgtgtaagatgagtctgttgaagacagtagatattgtttggtggttttctaattttttatttgatttatttcttgatttattaagacagagtttcactcttgttgcccaggctggagtgcaatggcactattttggctcactgcaacctccgcctcctgggttcaagcaattttcctgcctcagcctcccgagtagctaggattacaggcgtgtgccagcacacctggctaatttttctatttttagtagaaacggaatttcaccatgttggccaggctggtcttgaactcctgacctcaagtgatctgcttgccttggcctcccaaagtactaggattagaggtgtgaggcaccacacctggctaggtgttggttttgttaaacccattcggccattctttaccttttaagtggagcatttaggccatttacattcaatgttawtattgagatacgaagtactgttatattcatcatattcatcatattagttgttacctagatacactgttttttttttcactgtgttattgttttataggccctgtgagcttaatgctttcaggaggttctattttggtgcacattgagcttttggttcaagatttagaacttttagcatttttcgtagtgctggtttggtagtggcaaataccctcagcatttgtttgtctggaaaacactttatctcttcatcatttatgaagctaagtttcactggaaacaaaaatcttggctgacaattgttctgtttaaggaggctaaagataggaactcagttccttctagtttgtgaggtttctgctgagaagtcttctgttagtctgatagcttttcctctgtgggttacctgatgcttttgtctcacagctcttagaattctttccttcatgttgactttagatagcctgatgactatgtaccttggtgatgatctttttgcaatgaatttcccaggagttctttgtgcttcttgtatttggatatctaaatctctagcaaggtcaggaaagtttttctcaattattccctgaaatatcttttcaaacttttagtcttctcttcttcctcaggaacaccaattattcttaggtttggccatattacataatcccatatttcttggagactttgtgtatttcttttgattctttttgcttcatctttgtctgattggttaatttgaaagctgtgtcttcaagctttgaaatgttttcttatacttattttattgttgaaactttctgttacattttgtatttccctaaatgtgtctttcatttctagaagttctgattggtttttctttaagatatctatctgtctggaaactttttcacttatatattgaattttttttaaatttatttttgttgattttcacctttctctggtatttccttgagtagcttaataatmaaccttctgaatttttatttgctatttcaaatatttcatcttggtttggatccattgctagggagcttctgtgattttttggggatattaaagaaccctgttttgtcatattacaaatccctgtcttaggtagagtattgctttaaattgtttttaaatttatatttgatttcttttaaatttctttttatcctcttgaggatgtggctttaatgtttatagtttattatagcctcatttgattcttggtgcttttagggctgaagactgtatgagttcgtttgttacagagtctttgtgtgctggctttcttagctgctcattgtattagttatgtacttgatgtgtgggcaagttcactgtctcctatggggttggaaaagcaaggatctcttgaagcttatttcattgccccatcgtatgcatttttaaaattttaattagttttttcctgttattttatttactgagttaatggttcaagttttaggccaatagaggatgtatctccgggtaggaatcagttgttgctaaagccagtgggtagatgcaatacccaatggtgggcagggatcccagccttgatgaaggtggctgggagagctctccattagatgcactgaagttttagcagggggaagggtgggagctaccttaactcccctgccaggccagtaggaaatctgtctacctcccagcctcactcctgcccctgtgttctggctgttcagatcagacaggtacctctttttgtctgtaagaacattgatattccaagtagagaggaattatgactctgccwctcatgcaatcctgaacctggggagtgctcctcctgtggggacataatcaccctgaaatgttccaggaaggctgtctatagatgtgtccwcgctgagttcctgtgggaggagtctcagttgtgtctgcagttgtggacaaggcagaaacaagggccccttctccaagacccttcatgtgctgcctgactgttggggtagaggtgcagactttctccactgagcccagtgctgcaatagcatctctgctatgagaaacttcccaccagcggaaagatctgggactcaagtcctgccatccggattcttttgtcccatggcatgttccctagaagtggcattctccctcttcccctagtagtaggagttcctgagagccagactacagtgattggtattgcctttctggggctagccacccagtggggctgccacactctggactcgtactggggatgtctgcaaagaatccggctatgtgaactgactttaagtctcccagcattgggaagcagcaccagctctgatggaggtggcaggggagtgatgtagaccctgtgagattccttggttgtagataggcttagtgtgctggctttttcaaatgctggttataatcatagtgaacttgtcatgtggacagactcaggacctctggttaaccagagtactgcaggcaaagttgatagccgaagtcacacagccattttctttttcctgggcacagagttattctacctagagatgctgtaatggcccgagttgattgacctccaacagaggtggcgcttgaaaaggggcatcagctggcacagaggcagtgggatttgagcttgccctaagtagtctggggtaagtattctggtttctcaggtgatgggtggagctataaagctcccaaaagtttatgtcctttgtgttaagctagtagggccagtggaggggcatggccaactgctactccataacccctttgtgaattcttctgtgcagcagactattatactcccctctggaacattaccccagtggcctgagagccaccgccaaccctcacaggggccatgacttgtccccatcaaggaaagtcagagcacagacccccctaactttgcccccacttggggaagcattttttaggcataaagctacaaaagaaagatatagcagttttcaagtcacacytgacttttagagcaccatagtaaagaggacctcttgttaaaatacaccgtgggcttgatgaatttccttatgagcataatctgtgatattccaaatgtgctctttattgctattcttgtcaatattctcttcttccacaattaactggtgttacagtcccartttrtaaatggctttgagtgttttgagcagttttctaccctcactttcataaattgagtggaatcttgcactttttacatgttctgctttggaatttattgtattgtgtatacattgcatttttggttgtttatactgcaaacctgactcccaaagacattaacatgatatctatcgagtcagtctagtactaactggggtgaaaaatttcattggctattaactttataaaaagttagtttattacagaatattttcatattaggatcatttatgtcactgccccacctacaacacaaactaacaagagaagaactgacaagaacatccttcataytgtgttactttcctrtttactggaatgctttttgtaggttgtttttgtatrtttctaaactttatttttctccttttggtgtcaatcagtaaatctgctctactattcagtgtstacatagctgtctaatacacttttttttttatcctggatggttgagtttgctggaatattttgagacaattaacatttataacattttaatccagctatctgagcatttaatattcctgtctggattattaaggttatcttgatgattatgaagtgattttatttttccagtcctctaagttgatatattaattctgaatttattcgtttataaaaagaagtcttaataagctccagattacattgtcccactaaacataacccattttccttttctgatattctttgactattttattttaaattgagggtataattttcttctgtcttcataaactatgtgaatatcttaaaaatgacatctagtaaagaatattcttgtatctcagatagcttatgtattatatataatctttaattttgcgagatacagacctttatagagtgtgttgaagggaagagtgtatgaactacttgcaatctcttccttgactattttttagttcttaaaataattatacctacctatattcctgaggcaatattttttattttactttttcttttgaatggaattcagtatgtatttttatggcaaaaatgtgctttcatagaaagtaactttcatatttagaataaaatatatttgtatgtatattatgtatttatataaatgtatatcaaaggtaaatgacagtaatgattcatcaggtattaaaaaagtaaagtaaaatttaaatgatcaaatttcactagtgtaatattaggactggttaatattttttcttgaacataatgatttagaaatgaaaatttgtgattattacttgattacattaaaatagtcttaaagatatttctgtccacattgccatgtttttaaaaatgccaatgaaataagctatcaaaaattataataaaatattctatactattaagttatatcaatttcccaattattacaaaataaaacgtattgttctgaatgtaacgaagaggagatatttcatacttaaattctgaatccagctgttttacactatgaaatattaattgcatgatcttaaggataagaacctcttttatagtacttctgtaagagaaataaattggtcataattgtatttcattttcttgattgaatagatacatagaataaaatgcactgcagtcttctgacaatcacatcctgagactctgcttaaatagctctattataatcttacagcatttttagtcatttaaatacaagtttagttctgttgtagccttcagatattttgcaccaagatatttaactttgtagccttcagatattttgcagcaagatgtttaactgggaaaacccttagttattcatattcagatttaaattatttcacttacaaccatagctaaatatttaaaactgcaatgtcccactaaaacatagctgttataaatattataattatcatcataatagaactgacaggaaccactatcatttatcttacatttcaatacttcaggttatatgattcagtatgaaagtattgagatagatttttaaattctaaaaccaactaacctacctttcctttcttctttggttccttctacccttcctaattttctctagagaactaaaatgaatgtcatgtggctaagaaaactcatgaaatgttttctctgtattgtatgtaaatcattgttactctccagtatgtatagtattttaatctatatagtccagagcatattaaaattgggawttttttttttttgtggagcaagatgaccaaatggaaacctccactgacttgtctacacaaaaaagcacctacatasgaactgaaaatcaggttaaccatccyagtacgtggttttaactttatattgstaaaagaggcactgaagatggtaggaaagaaagtcttgaattgctgatgccacccctcccccattctctgacagtagctgcacagcacaggagagagaatctgtgcttctgggggagggagagtgagcaatcaggattttgcactggaagaactcagctggtacccatggagggagcatttagactagccctagccagagagaaattgcccattcctggggttggaacttgagtttcracaagcctcatcaccattggctaaactgtctggggtcctaaataaacttgaaaggctcactaggccacasggactacaaatcctaggcaagtcttagtactatgctgtgcttggagcaagtggacttgggggctataaggagaggcctcttctgcttgagaaaagcagagatataagaataaaggggactttgttttgcatcttaagtagcagctctgccactgtggggtagagcaccaagccaactcttggggtccccaattttaggctttggcttttggacagcatttctaggcctaccctgggccagaggggagcccagtgttagaaagggtagtcttaggcctggcagcatttgccacaagctgactgaagagtacttgggccttacttcagtgaacatcagtggtaccctggcagtacattccatgggcccttggtggtagtggacacagggagaatctcctgcttggggaaagaggaatgaagagggggaaagactttgtcatgtggcttgtattccagctcagccacagtagaacagagaactaggtagattcctaaggtttctgactataagcactggctcctggacagcatctctggacccacctggggcctggggaccttgcaacccttcagaaaagaacacaaatctggctgggttcgctacctgctgattgtagagccctggaccttgagcaaacatagagataggtagtggctatagcaggccttggaaaagacccagtgctattctggcttcgggtctgacccagcatagtcccagtgggggtgaccacaggggtgcttgtgtcaccccttccccagctgcaggcagctgagcacagagagaaggacttcatttgtttgggagaaagtaagaacaagagtctctccctggtcatccagataattcttccagatcttatcccaaactgtcaaggtggtacctctctaagtatgcaagaactacaacataactgggcttgggtaccccctaatgcagatatggcttcagtgaacaaaactttagaccatatgcccaattctcttctaacacctggaaaaccttcccaagaagggtaagtacaaacaagcacagattgcaagggaatagaaacaaataacctacaatggagttctagtacatctgtcagtagacgcttccaaggaaaccttacaggccaggagataggaatatggcatatttaaagtgatgaaggaaaaaaaccttttaccctagaatagtatattcagttaaaatattcctcaagcaaaaaggagaaataaagactttctcagacaaatagaagctgagagatttcattaataccagatctgttgtacaagaaatgctaaagggagttcttcagtctgaaagaaaataatgttaatgagcaataaggaatcatctgaaggttctcactggtagtaataaatatgcagaaaaacacagaatattataatgttgtaattgtggtgtgtaaagtactcatatcttaagtagaaagatgaaaagatgaaacaatcaaaaataataactacaacaatttcagacatggatagtataataaaatagaaacaatgataagttaaaaagtgggaatacgaagttaaagtgcagagtttatattagttttctttttgcttattagtttgtctatgcaatcactgttgtcatcagtttaaaataatgggttatactatattatttgcaagcctcatggtaatctcaaataaaaaaataaaacagatacacaaaaaataaaaaacaagaactcaaaacataccagcagagaaaatcaacttcactaaaagggagacagaaaggaagaaaagaaggaagtgggaccacacaaaacatcagaaaaataaataacaaaatggcaggagtaagtccttacttatcaatgagaacattgaatgtaaatggattacatgcaccaatcaaaaaacagagttggtcaatgaatgaaaaaacaagaccaaacgatctgttgcctacaagaaatgtacttcacctataaagacacacctagacagaaaataaaggaatgtaaaaagatactccatggaaatggaaacaaaaaaaaataagagtagctacacttacatcagacaaaatagatttctaaacaaagactacaaaaagaggcaaagagggacattatttaatgataaatgggtcaattcagcaagaggatataacaattataaatatacgtgcattcaacaccagagtacccagatatgtaaggcagatgttagagctaaagagagaggtagatcaatacaatagctggagacttcaacacccaactttcagcattggacagattatccagttggaaaactagcaaagaaacatttaatctgtatttagattgaatagacttaatagacttttacagaacatttcatgcaacagctgcagagtacatagtcttctccttagcacagggatcattctcaaggatagaccatatgttaggtcaaaaaacaagtcttaaaacatttaatataattgaaatcatatggattatyttctttgatcatgattgaataaaactagaaataaataacacaagaaattttgaaagatgtacaacacatggaacttaaatagtttgtttctgagtgactagtgggtcaatgaagagattaacaaggaaactgaaaaatttcttgaaacaattgataatgaaaacagcataccaaaatctataggctacagcaaaggtagtacaaaaaggaattttatagctataagtatctacatcaaaatagaagaaaaacttcaaataaacaacacaacagtgcatcttaaagaactggaaaagcaaaagaagtctgaacccaaaattagtagaagaaaagaaataatgaatattagagcagaaataaatgaaattgaagaaaacaatacaaaagatcaatgaaacaaaaagttggttttgtaaaaagattaaaaaaaaacctgacaaacctttagcctgactaagaaaacagaagaggaaatccaaataaaaccagagatgaaaaaggggacattacaattgataccgcaaaaattcaaaggatcattagaggttactttgaggaactatatgcttataaattggaaaactgagaagaaattgagaaatccctagacacatataacctaccaagattgacctgtgaagaaatctaaaatctgagcagaccagaaacaagtaatgagattgaagctctaatgaaagggatccagaaaagaaaagcccaagacccaatggattcactgctgaatttttccaaacctttaaagagctaataccagtcccactgcaactactccaaatattataggaagtgggaatacttccaaactcattctgtaaggccagcattacctcaataccaaaaccagataagcatcagaaaaggaaaactacaggtcaatatcattgataaacgttgattcggaaatactcaacaaatactagcaaactgaattcagcaacacattaaaaagatcattcataatgaccaastgggatttattccagggatgcaaggatgattcaacatatgcaaattagtcaatgtaataaattgacaagatgaaggacaaacaccatatgatcatttcaattgacactgaaaaatcatttgataaartaataaaactgtaaaaaatactggatatagaaggaacacacctcaacataataaaatccatatgtgatagacccagagctagtatcatacagactagggaaaaactgaaagactttcctctaagatctggaacatgacatggatgttcactttcaccactattattcaaaatagtactggaagttctagatagaggaatcagactactgtctgattgaaagaaataaagagcatttaaattggatcatactatccctgtttgcagatgatatgatcttatatttggaaaaacctaaagacttcaaaaatctatttgaactgataaacaacttctgtaaagttgtaggatacaaaatcaatatatacaattcagtagcatttctatgtgccaacagtgaacaatctgaaaaagaaatcaagaaagtaattgcatttataatagctacaaataaaattaaatacttaggaattaatgtagccaaagacatgaaagatctcttcaatggaaactataaaatattgatgaaagaattggataaggacacaagaaaatggaaagatattccatgttcatggattggaaaaataaattttgttaaaatgtccatggtacccacatcaatctacagatttaatacaattcctctcgaaatacctagacatttctctcagaaatagaaaaaaaatgctaaaatttatatggagccacaaaaggctctgaataggcaaagctctactgaacaaaaagaagaagactggaggaatcacattacctgacttcaaattattatacaaagctatggtaaacaaaactgcatggcactggtgcaaaaatcagacatatagatcaatggagcataattgagaaaccagaaataaatccatacatctatggtgagctcatttttgataaagctgtgaagaacatacactggggaaaggatagtcttttcaataaatggttctgggaagactggatgtccatatgcagaagaatgaaactagactgctatctcttaccatatacaaaaatcaaataaaagtgggttaaagacttaaatctgagatctcaaactgtgaaactactaaaataaaactttggggaaactcttcaggaaattgaactgggcaaagattttttgagtaatactccaccaagcacaggcaactaaagcaaaagtggacgaatgagatcacaacaagttaaaaagcatctgcacagcaaaggaaacaatcaacaatgtaaagagacaacccacagaatgggagaaaatatttgcaaactgtccatctgacaaggaattaataaccagattatatatgtattagtccattttcacactgctataaagatactacctgagactggacaatttatatatatatatatatatatatatatatatatatatttttttttttttttttttttttttttttaaaaggaggtttaattgactcacagttctagatgactccggaggcttcaggaagcttacaatcatggcagaacggaagcaggcaccttttttacaaggcaggagagagtgtgagtgtgtgaggaaggaactgtcaaacacttataaaaccatcagatctcatgagaactcactgtcacgacaacagcgtgggggaaaccacccctgtgattcaatcacctcccaccaggtctctccctggacacatgaggattacaattcaagatgagatttggatggggacacagccaaaccgtatcaatataagtagcacaaacagttctgtaggaacaatctattaatctgatttttaaatggtcaaacggtctgaatagacatttgtcaagacatgcaaatggcaaacaggtatatgaaaggtgttcagtatcattaatcatcagagaaatacaaattaaaactgcaaagatatatcatctcatgccagttaaaatggcttttatccaaaaggcagacaataacaaatgcagacaaggatgtggagaaaaggaaactctcatgcgctgttggtgggaatgtaaattaatacaaccactattgagaacaatttggatgttcctcaaaaaactaaaaatagagctaccatatgacctaggtatcccactgctaggtatattattgaaataaaagaaatcaatatgttaaagagatatggacactcctatgtttattgcagcactcttcatgatagccaagatatggaagaaaccttcacatttatcaactgatgaatagataaagaaagtgtggtacatatacagcatggagtactattcagccataaaatggctcacgcctgtaatcccarcactttgggaggccaaggagggtggatcacctgaggtcaggagtttgagaccagcctggacaacatggtgaaacctcgtctctactaaaaatacaaaaattcgctgagcatggtggcatgcgcctgtaatcccagctactcgggaggctgaggcaggagaatcgcttgaacccaggaggcggagtttgcagtgagctgagattgtgccaatgcactccagcctgggtgacagagtgagactctatctcaaaaaaacaaacaaacaaacaaaaaaaaacagaactatgatatcctgtcgtgtgtagcaacatggatggaactggatgtcattctgttaagtgaaattagccaggcacagaaagacaaactttgcatgttctcacttatttgtgggagctaaagattaaaacgtttgtactcatggagatacagagtaaaatgatggttaccagaggctggggagggtagtagtgggggtggatgggaagatgggatagttaatgggtacagaaaagtagaatgaatgaatgagatctagtatttgacaggctaacagggtcattatattcaataacaatttaatcgcatgtttaaagataattgaaagaatataattgtttgtaacacaaaggatcagggcttgaggtgatagatacctcatttgccctgatgtaattattatacattgtatgcctgtatcagaatacctcatataacccatatatacctactatgtacccacaaaaataattttaaaaaactgaagttttaaatcagaaacattttcttttagagactttattttgtggatgttaatgaagttttgtggtgaactcactaaaaccaagttgtatagttaatataacatgcaaaatcacttactgtatggcagtatgtctcraacatataaaactttgcctctttattgaaaaacacattctgaggtcaatctcaaaacctgtgaagaattctccctgcttcacaagccaaactagtagggatagtgatttcctcttctgcaccacaccagaacaacatgagtaagagttccaggcacttgaaaaacatagaagaaaggaagggaaagaagcacctgtgcattcttccattctttcaagtggttacgtcttgtcaactatgttgtgataagagcagagaagataattattcaagatatttgcaattattcaagataattttgyatatttgagtaatgcaaatttaaaaactttttaaaaatttaaaaacactaatgcaaatttaaaaacaaattttgcatatttgagtaatgcaaatttaaaaacatctgtaggtgcatactactcatgtatgtttgtgagacatgaattcagtgattccaagtcttcaacatcatttcatgtccaaactccctgtctgtcccatcctctgagatttgggtaaaaaagaatttgtcttggggtagagctttacccaaactttaagaaaggacattggttaagggcacaagaggcatctctttagtggtagattcatgtcatcaggtgtggaagtcatggtggaaaaaaaatagaaaactaccagggagttgtggaatactggactttggaaaaaatagctcattaaagacatactgaataacattttacatgctgtgtgtgtcttttcttatcactttgtcattttgtttgcttaaatacgtgttatctatcagctttgctgttaagaaaactatgtcatggaaaggtagttgaatatttagtttgttactattgttcagtggtcaagtgagaactccagtaaagtttttagaatttaaaactagaattgggtatgaataagaggagcaaaatatatacatataatgtttcttttaatattttagatatgtctacgagatccaaagtatattttttataccttactttattacaattacaaagtctgtatttttcttttgcaaaatttgcacttgaccatcttggtcccagaatatcatactttcagaattttctaatgttcttaatattatgctttatattatatcacacaattactgaataaattaggtgaattcaaattttaaatggatacattaaacatatcaaaaggaaaagatcaaattagaaatagttttagaatgaaagattgggcttacactgtcttgctgtaagataaatatttctgcatagcacatgtgaagtaattaagacacagcagaaatatcctaagcagtgtaaaagcactaaaaatgggaaattggtaatcactttctatgagcaaatgaaattacttacaataccaattcccttccattgtaatctctttctaactttatcgtacttggaaaattgctatggtgacaaagaagtttttattttccctgggtagatagaaattcattggaagactttataagtagccagaacatggtctcataatcagttagcagatttgtatcctcgactactacttgtattctgtaaataaacatcttttgactagcaagctggattaagaatgagttttcaaacatgcagtcacataagtgtgacttttaagtcaatgtgtcttttaagcaattataatttcacgtatcttatgattagtttcatatacataaggattcatagtagaggagaataataaatacaaatgtgaaaataaaaggggcatactgaagaggttaattttgttaaaatgtgataatcgtaagcctaatttataaaaaaatgttcagaatgtcatcaccttgctaatgaaataaaacttttggtgataacattttagcaaggctgactgtgtaatttacagtgtccagtgaaaaaagaaaacgtagtgccccttcgacaaaaattttaagttggtgacaacagagagtttaccaagaagaaggccctgtgtggttgcatagattgtatattcatgaagcagatcttgcttgttagtctaaatttgctattagaaaagttttgaatacagtagataaaatatctggggaatatgcttggttgtcactcaggagtgtttatacaagtgtgatcaaaattataagtaacatcaggaaattgattatacaagcatattcactatacaagtgatgtcaaaatgatctgtaaggttaacgaaattcagcaaaagtgttaatgaaatatcaatagacctttgtgaaatataaattaaaattagtaatctaaattttatatactgaaatgaagtgtgagatgtatgcctaatttacagagagcattaaaagtttgggagaagagtatgatctcccatgagtggtctttacaatgtcttaaacataaggctatatctttaataattctgttgccttctagcccacaacctgacatatcttgatatttgatgagtctcaatgagaaaaccattttgtgtgtgtgtctcctggaatctttattactctagcaggaaagacttgaacactgttttctttctttctttctttctttctttctttctttctttctttctttctttctttctttctttctttcyttcyttccttccttccttccttccttccttccttccttccttccttccttcctttctttctttttctttctttctttctttcttctttctttctttttttttttttttggaaacggagtctcactctgttgcccaggctggagtgcagtggcacgatctctgctcactgcaaccttcacctcctggattcaagcgattctcctgcttcagcctcctgagtagctgggattacaataagtgccaccatgcccagctaacttttgtatttttagtagagatggggtttcaccatgttggtcaggctggtctcgaaatcctggcctcagttgatccacctgccttgcccacccaaagtgctgggattataggcgtgagccactgtgcctggccttgagttttctaatgcataatgcactgaagagttctctttcataaattcagaactgaggaagaggagaaagaagacagaacaacagagctgttattgaaaaatagacgtcttggtttcttttaacagtgttttgtcattctccttgtggagatatttcacctccttggttagatgcatttctaggtatttaatgttttgttttttttgtatgtggctattgtaaatgagattgtgttcttgacttgactctcagctagaatgttattggtgtataggaatgctagtgttttttatacattggttttgcatcctgaaacattactgaagtcattttcagttctaggagatttttggcagagtctttagagttttctaggtatagaatcatattgtctgtgaagacagatagtttgacttatttggatgccttttttttttctcttgcctggctgctctcactgtgacttccagaactatgttaaatacgagtggttagagtgggcattcctgtctaggcaacacaaataaatggaaaccattccatgctcatggattgggagaattaatatagttaaaatggtcatactgcccagagcaatttatggacttaatgcatttccaaactaccaatgtcattttttaacagaagtagagaaaactattctgaaattcacatgaagttaaaagagagcctgaataggcaaagcaatcctaagcaaaaagaacaaagccagaggccacacattacctgtcttcaaactatactacaaggctatagtatagtttgtatagtatagtaaccaaaacagcatggtactagtacgaaaacagacacataggtcaatggaacaaaatagagaaggcagaaataaagccaaatatctacaaccatctgatcttaaacaaactcaacaaaaattaagcaatgaggaaaagacttcttattcaataaatggtgctgggataaagggctatccatatgcagaagaatgcaactggatccctacctatcaccatatatgaaagttaacacaagatggattaaagacttaaacataagccctcaaaataaaaaaaaatcctagaagaaagcctaggaagtgctcttctcaatatcagccttggcaataatttatgactaagtcctcaaaaggcaattgcaacaacagcaaaaaaattgacaagtgaggcctaattaaagtaaagagcttctgcacagcaagagaaactattaaaggagtaaacagacagcccatagagtgggagaaaatatttgcaaactctgcatttgacaaagatctaatatccagattctataaggaacttaattcagcaagcaaaattcaaaaacccccattaaaaagggggcaaagaacatgaaagacacttctcaagagaagacttacaatggacccacaarcttatgaaaaaatgctcatcatcatcaatcattagagaaatgcaaatcaaaatcacwgtgagataccatctcacaccaatcagaatggcttctgttgaaaagtcaaaaaatggcagatgttgatgaagatgcagagaaaaggggacacatacactattggtgggaatgcaaattcgtccagccactgtggagagcaatttggagattactcaaagtactaagtgttgaactaccattcaacccagcaatcccattactgggtatatacttagagaaaaataaatcattctaccaaaatgacacaagtacccatatgttcacgcaatgctattcataatacaaaaaacatagaatcatccctggggcccatcaaaggtggattggataaagaaaatgtggtccatatacaccatggaatactatgcagccataaaaataatgaaatcagtcctttgcagcaacatgggtacagctgaaggccattatcctaagtgaactaacccagaaacagaaaaccaaatacttcatgttattacttaccggtgagagtttaacattgggcacacatggacataaagatgggaacaatagacattgaggaccactagaaaaaggggggatggaagggggcaagggctgaaaagtttcctcttgggtactatgctcactacctgggtcacaggttcattcatacctcaagcctcaacattacacattatttacctttggaacaaacctgcacatataccccctgattctaaaataaaagttgaaaaaaatggagttgataagatataggtcaaacaagtgaaagtttgctctctttcattggttgttggcaaaacattgtctaatcagggcatatttaatgaccctagggtttttccataagcgtaggtttatacctgggaaagtccaggttatggtggaaaatacatagcatataagctgccaatttttcctttattgcccatgttttacattatattctataatggcacttttttcctgctgaacttgaatagacatcataaatattttcagtacttcactctacgtagctccactaattaaagttggacttgagataaaatctgtttcctatattgggcatggtgtaatctagtaatttctggaatgtataaaacttaattaatatacagatatacggacacttgtattctgctggagtcttgcattctgaaattcttggaaaatagactgtatgcacatagttttatctgggtggtgttggaattaggggagataagaataagaatatggattataagccaatccactatatggatgtgtggaatttaaatctaagagcttataaaatttattatattctgaaagaggtagccacatagaaatgctgcagagtaagcaatagcagacttctaggaaggtgctggaattcccaagatgagataaagaattgggctaggaattgaatgaaagatttagtgtactacctctggtatttgcacaatgaagccaactcagataaactctttttctgcttctcgctgcactgttttccagcatttttttctcattgtgtgcaagtagctaggacatagcaggatataccagataaaagaaatggtctagtatccagagagccttacagtcatacctactgaccgacctcccatttccaatgattagaattgtaatccgtatgctgttataggataaaatgttttagcactaccctctagatgtgattttctatttgaactagctgtggcctgtattaatgtatggtatgaatgaaaattgtatattttgaaacacaagtagatggcttgtgaatgctagttaaatattaagagcatactgggggactaatctttgacattttctctgccaagacaacccaagcaaagaatatttaattctcatgctttataaaaatgataggagttaagggatctcgttttaagtaaatttatatcaaagaaggagataaatatccttcagaggcccatgttaataaaatatgaagttatgaggagtttgttgaatactataaagaaaaaacaaattccaacaagttggtaagaggcaaataacaaactaatgaatctgattaaagtcttttccatatctgatttcaagaacctatagactgaagtagtaaagtcactacagtattccaaatctggtagacaaactgtaatgatgaatttttgggcacccagaaaatatttccctgaacaaatcatgaagtcaccctatccctttctccctcccttccttcttctctcccttcctctctctcttcattcatttctcccttccctccctccttccatctcctgtttttttcttcttcttcttctttttaaatcacaaggactcactgaacccagagataagcattgtcacagctctggatagtaaggaggaaagggaattgcaggactgtgctgtttcatcttacatgacaaatggatccccaataaataggcctctattttaataattaaattgtatggtgtttgattgattgaactcagaaaagataaccaagaatgtggaaagtagaaatcaagagtctataaatcagatctaacgtaggtctttgattatacatgcatataaattctccaactctcctctttcagtgagagttgccagagtgtttccttgtcagtttaaaaaattagaataagaaagcccagaatgtgctgacacttgaggaggagaaggtctttaatctaaatattttatcacattggttaaagaaccattggaacacttccaataatagagtcgtatttcagcttagattattattttagtagttccattccttttgccttgtaaatcacgtggtcacattacacagcccaatgttaattcatatataaagttatttgaaattaaataggccaaaaacatttgaaatcatactgacattttcatacatccatactattttccaacttcaaaagtattttaaacacaatggtctcattttggttactagacaaatctagccttgttgtagtgtggatgttaagaatttcttagccataaaaaagaatgagataatgtcctttgcagcaatagggatggagctggaggccattatcctaagagaactaatgcaagaatagaaaactaaaygccacgtgatctcacttatatgtgggagctaaacactgagtacacatgcacacaaagaaagaaacaacagacattggggcctatttaaagatggagggtaggacagggtttttcgtagggacagggtttttccatgttgccaggaaaggcaaggattgaaaaactacctattgggaactatgcttattacctgggtgatgaaataatatgtacagcaaacccccatgacatgcagtttatctataaagtcaaggtgcacatgtacccctgaagctaaaataaaagttaaaaaaataattttttccatattttatatattctgtaaagagtgtggatttgagttatatagtttcccagcctgtccaggcccaggtgacgttctttgttcattgcttaataagaaaataaaggtgaaactattaccatatgtagtaaagtgattcataggaatgaattactgccattctcaagtctatttttatctgtattagctttttctttatggtgttggaaagtctgaaaaccgtaattagtaaccagtactttaaaaagatatctatagattttgtactcatttacatttgcaattactttattatcctggactttcagacttgaacatgagcaaaattgtgttaactaagacagcattagtttatttattcaatgaataaaaatccaacttgagtcaccatgggaatacccgtgattgacttgcctatttggctgcatttcactctcacacattgtgatgggataaaaacactatattttctaaactgaattktcaaaaaggcactaaggatgactgagcaaagcattctgttatcaatagcgctgtactcagataccagcatgtgaaatctacatttatgtctgcaattttggagaactaagaaccatatggtatcttggttttatacttcctgaatcagcttaattgcatctgcataccaattaaacttgaataaatatgtttgagtgctttttagttgttgatattttgttataaagcttttactccaatttgactaaaagcatttttaactgcacttggtttataaatgggttatcattttatattaatacacatcatataccatgttatttctttttatgataaaagcactgtttggcgtatccatatttcttagcaagtgttaagtaaaagtgatatagaaagtatctaatccatctgtgaatcaagttaaattatatatatttatgtatatatttatatatgtatacatatattattgttattgttgctgttaatttctataatgcaatctagaacatgaatgaacttttaacttgttgacactgtttctagagcattttgagtggttaaataaatgtaagtataaatatagaactaaacttgaggcttatatacattgaaataattgatgtttcagatgctgctcatctcatcttacccaaattactgtaccagcagactttggttacaaatcactgaatactattggttaaagaaagtcatatacatatacctgtcctcattaggttactatagaggctgcaatccttatgagctttttggttaagactctttaaaggagttgcatcatttatggaggacctttattggtcactgtatttcacaagagtcagattaaggtccattactctgttcaatctactcttagatccgtttgatgctgatgagagttttctatccagggtaaagggataggtgagtactaagtgatcaaagtcacatcaaagcatttggtataaggaaacaaaatgattgtgatactgcattaatggaaggttgctttctcatgctttgaaaataaacggctttgctttacctgaatatttatttccagtatatttcttccttgcaatctactacatgaaacagagggggaccgttatctagtgataacatgtttttctagttacattatatgttaagcaaactccttggttattcatatttctaatagaaacgctaatatttcatggtattttgtgatttaacaccatccccgatcccatgcaccattttgaatgattatgtggcattgtataccactaagtattctattaaatagaatttataatattcaagttaagtatattttattttttatttgtatttttattatacatgtttttaaattgttatggatacctaacagttgcacatatttatggggtacatgtgatattttgatacaagcatatagcatgcaatgatcaaatcaggataattggaaaaatatcaggataattaggatatccataatattaaagatctatcatttcatgttaagaacattacagttccactcttctagtaattttaaaatatacaataaaatgtttttaactgtagtcaccttattgtgctattgaacattagatcttattccttatatctaactgcatttttgtactcatcgagcaatccctctttatctctgcctccttatggttgaataatattccattgtgtatatggatcacattttctctatccattcatatgttgatggacacttaggttgattccatatcttggctcttgtgaatagggctgcagtaagcatggaaatgtatatctcttttcgttgtattgatttcctttcttttggatgtacacccagcagtgggattgctgggtcacatggtagctctttttttagttttttgagaaacctccataatattctccacagtagctatattaatttacattcccactgtgtataagggttcccctttctccacatcctcaccagcatcagttatttcctgtctttaggataaaaaccattttaactgggatgagatgatatctcattgtatttttgatttgcatttctcttattagtgatgttgagcaattttcatataccagtaggccattttaatgtctttttctgagaaatgtctgttcatttgctgatttttattgtattatttttcttattacatttttgctattgatttatttgagttccttatgtattctgattattagtcccttgtcatatgggtagtttgcaaatatattctcccactatgtgggttgtcccttcactttgttgattattttctttgctatgcacaagcaagcttttttagttgacgtgatatcttttgtacatttttgctttatttgccagtgcttttgtgatcttactcaagaaatatttgcccagacacatgtcctggattgtttccccaatgttttattttagtagttttatagtttcaggtattaggtttgtcttcagtctactttgaattgatttttttttttttttttgagacaggggcttgttctgtcacttaggctggagtacagtggtgcaatcatggctcactgcaacctcagcctcctgggcttaagccatcctcccatcttagcttctggagtagctgggaccacaggcatgtgccaccatgcctgcctaatttttgtatttttcatagagacagggtttttccatgttgccaggctggtcttgaactgctgagctcaagcaatctgcccaccttggcctcccaaaatgctgggattacaggcatgagccactgtgcctggccttgagttgatttttgtatatggagagagatatgggtctagttttattcttctgcatatggatatccagttttcccagcaccatttattgaagagacagactgtcctttccccaaggtatatccttggcaactttgtcaaaaatgagtttactctagatgtatggatttgtttctgggttctctattctgttcaattggtctacatgtttgtttttatgctagtatcatgctgttttgggggttattgtagctcttgtttcaaagttattaatttgaagtcaggtaatgcaattgctccagttttgttctctttgctcagaattgctttggctattctgggttgtttgtggttcaatataaattttaatttttttctatttttgtgaagaatgtcattggtgttttgatacagattgccttgaatctgtagaattcttcaagtaatatgggcattttaacaatattgattcttctaattcatgaacatggaatatctttccattttgtgcatatcttcttcaatttctttcatcaatgttttatagtttccattgtagatatctttcacttgtaaagtttacttgtaggtatttaattttacttctagttattgtaaatgggattactttcttagtttctttttcaaattgttcactgttggtgaatagaaatggtactgatttttgtatgttgtttttgtatcctgtaactttactgaatttgtctgtgagttataatagttttctggttaagtctttcagtttttctaaatataagatcatattatctgcaatcaaagataagttgacttcttcctttccaatatggttgccctttatttattcagcttgtctaattgctctggctagggtttccagtactatatttaataaaagtgatgaaagcatacatccttgtcttttctatattatagaggaagggcttttagttttttcccatttaatacatagctagttgtggatttgtcatatatggccttttatcatgttgaggtatgttcctttcacactgttgagagcttttatcatgaagggatgttgaattatattaaatgatttttttggcacttattgaaatgatcatgtgtttttgtccttcattctgttgatgtgatttattgcctttattgagttgagtatattgaagcatccttgcattcctgagatgaatcccacttgatcatgatgaatgatctatttaatgtgttctgaaattcagtttgccagtattttcttgaggatttctgtatctatgttcactagagatatcggcctgcatttttctttttttgtcatgtcattgtctggttttggtattggggtaatactggccccatggaatgagtttggaaatagcctctcctcctcaacttttttggaatagtttaaacagtttatatttgttcttctttaaatgtttggtagaagttagcagtaaagctrtcaggtcctgggctttttttcattgggagacttcctagtactgtttctctttcactacctgttattgtatacattttagaaatattttgcaattttattgtttgtaaaagaaagtgaagcagactatgatttcacataaggtgacaatttcaataaagcagaagaacagtttagttcattaaaaattttatagaattatttggatagtttgtgccacttacacagtttattgatggggatgcttttttataaaaattatttttcataaaggttaatataacataaataaaaaaatgacttgactcacaacttaaaatgtgatttcttatgcaaagtgaaattttgaagctttaaataatttaattttactgaacatttgtaacagatacattttctcagtcttggacagggctagtgttggcttagaaaaattcatacacttaacattctatatttattttgcattttcctttatgcctaatgcagatctcccatgtagtagtagaattttaataaagtttgttaagtcattaacttataaacagattttacattctttggaaatatcactgttctttggaaacttcaccctgtggcctgtcttcatgacttgatttcttaaactgctacaaagaggtgttctttctctgtctgcatggcctcaagtgaattaatcattgcagaatggagagagacattttgaagaaaaataatgtagtgtgattagacacatttgcctcaggttgctgcagccagagtgtgttgtggtggtaatttactaaatggtaccctggtggtatgaatgagtttttaggttttatgactgctttacttttttccaagaagcgatttacacataggactttgctactgctcctaaaagaagcaatagaatcattgatctgaaattcaaaaaagcatcaccttgggttcttacattaataattaaaaaaaaaccctacaaaatagggtcagccaaaatcagaagcatttaatgctataaaattattatttagaagtaaaatgtataagttactttatagtgatatagtaaatattgctattttaaatagccaatgattgaaactacctacatgttttataataggagaaaccttaagtaatttgtggtaactccttttaagaaatcctatctgttaaaactttcatgaagagttgataatatgtatgaaattctttagcaggatacaacattgcataggcactttatctcggtgactcctcactgttctgcattatttccatgttacatgagtctcatcagagttttcacaaagccattcaagatgaggacayagttctgataagaacatgtttcattcaacataatgccatgtaaaggattcctgcatttaaaaataaactaacatagtagattcatgagattagacgttttccattttttatattcttcatgtcccccaaaatttccaactttgatattagaaatgaatttatttttaaagagtctattttaggaacattttgctttaaatatgaaaaagaaattacttacaagtaaatatttaatctaatttgaaactttatgtatttatgtttcatttttctattccatcctgacttttccattgtgattgtgattttgagtagtatttcttctcccagttaaaacaaatagcaaaacaacaaaccaacaactttaaacaaacaaaaaccaactgaacaacaacaaaaaaaaccctgggcatttttttattcttttctttctctcatccctctatcaataaacaattattactagtgttacccacaagattaccaagtttgttatcttgtttatctgtaccatgctatttaagcgagaatgtcgttatctctcctttggattattgcaatagaatcctaactgggtggctagttttggcaatcaatcctgtacaaagaggctatctctcttaatttagctccctacaaggatctggacctctaagttcctgacacttcatctcaaatagttattccctttactcacactgctacttggaatgatcaggcctgccccagggagtttgcacttgattctgcctctgctggaagtgttcttctcactcttcttcattcagctcaaatatcaccacctccatacttgtcttcttcattatttatctcattacagtaattatttttgtaagacatacatcactgttaaagatcatctaatatgcttatttgttttgtttatattctgtctccctcattggagtagatactcctccagaaaagggactagcccctctaattcccttctgaatcctctgtgcctggaggagaatatgtttcctgtttttgaattatttgagaattcacttagtattttgtgctagaagagtggtattcagactgtagtataataatcagggtgtaaaggacacccctgccctacataggcatggataccttttagataactaatttctcaattctcaatttttatttgtgattttccatacaaattacttgtttgagaagcttctgagttttgtcagtcatcttcctcatgtttctttcacaatctcccactttacaaaaaaacaagcaaatttatgaattcagattcacttgtgaatctgtttaggatgcattgttcagtttctaaaaacctctagtgtatcaaccaagggataaattactcagggagtcttttgagggcttcctaaataaatattggaaggtgcagtgccctgtttcctagaggcaatattctggtgagccattctcccctttccttcctcctctcctcctctctccctttggattccagaagtgagaaagtaagaatgttgctgtggggtattaacaggtttacttgatgctttcttctgaagaagaattttgactggatgatttgtttgacaaagaggattgctttgccaagtgcattgtgacacacatttgcatatatttttcttaaatcaaataagctaaatatgtggcttgacagtattgatgaaaatatattttaagcccacttagagcatataacagtcagaaaaatatgtccttttaccttataggaaatttgttaatggttaacttttaggtcttctagagattatgtagattttcaaagttattttagtaaaaagataatttgaaattattgtgctagacaatgtgagcaacatcaaattgttcaaaatatctctgtataaagtacacttgatatagaagaaagtgaaaaagagagttcatctttcacatggaatataagagaccactatctttcctcatttccagagtatctgtacactcctttaccctaataaattttacagggatagtatctctttattcaaatttgtacaatcttaatttgtagctcacatagatgcaaataagtttattaagaaaacacagttctgtagagggtgctgattcagtagtttttcacagtattcagtcaagaatttgatgtcttaaactcttgactaaattaaaaaggttaaaacactttacctaattttgtaataaaaataatgacatttatcctttgcttccctttatgttgagcagaggtctaagccctcaacttctttagtccttataatagttaaatttcttatggtaggtgctatgtatgactcaatttcacacattgtgaaattgaagctcaaagggagattaaaatactgtagattgcccaaagttagtgagagcagaaaccaaaatccaaacctagataatatgtctccagaattttttattaatacacattaggtatacatatttttagggtacatgtgatattggatatatttatataatcaaatctgggtaattggaatactcattatcttaaatatttatctttatttttaactcctggtacatttgaattattctcttctagctattttgaaatgtatattccattaccattaactgtagtctggaatgttaacccatatattatacaggaccaaaccagaatgctatactaagatgtgcagaagaaagttaaaataatgttttgagcaacattgaccctcatcagtaattattttttatattaccgaacatttatatatagtgtatactatatgctaggaaatatatacataggattccaatgccagtatgtggtttttctacaaacaaagcaaatagggtctcttttaggttttccttccagtttctgggtacccttatgtttgttgtatgatattctttctccactctgtctaagctaggatgtctgtttctttctttgaatattttattttgaatcacaaaatgttctcagatcctacataagtacttgtttagtattcaattctgaatatgcaactgttagcctgaggaaatctgtaggacggtacaactgtctctctctctctcgctcgcttgttttttgttgaaattgttgctagtggctgcatttttttcccttgtggaattaatattttctgtatttcctgtgaactatagtgattggaaagtcgcttaaaacttttcttgattacctaacartggatctgtcattggaatactaatttggaatactaagccacttccaatgaaacattcctagagcagcaatagcattcagaatattattttgcaatattatatgatgttattgttactgttgtatatgtaatatcaggatatctttcttgtgcattcatcattgttataatttccgaatttgtctttagcatcagcaagatctagattaaaatttagatttgcctttacttttctgaacccaaatttatttatctgataggaataattatattccttaaaaataatttttatttcaaagtcataaaaaataaaacaatattcaattacaagagatatcaggtgcttacagagcaagagtgtttttacttgattgaaataaggacatatctctggcagtgagagtctctgcttttatttgattggattagatttaattctattatcaggaatactgtgttctataaatgttagtgcagctactatttgcatgtttctgagtgaagtacttaactagtttaggtttccatttattatcctcaaaaaacaagttcattttccaaatataaaattcaatacaatagttggtcgccaaggcagaactacctaaatgttccaagatgcaaaatccccacttagtggccactcaagtcggtcacatcacccttgctactgggcacagctgaaaaggcccttgtgccataaacacaagtccttttctcatgaatgctttcttacctattattctgtcaaattagcaatatattagtataaacccaatatagtttagtcattcctgatagtgatatttgatgcagtcccatagtctcaaagaagacaatttactgaatttattaacaaagtttaaagggttttcttaagaaaggaaagaaatgagctaaatttgttgtatctcctttattataatcttcattatgtaactccttttaaaaaaacttttaaagtcaaagaacaatataggcaatatgctttaatatatttagtaaagtctactttgaaataaaatttatgaatttaggtgaatttgttaattattggtataatatttaacattgccaccaatttaaaacttatttctccataacttgaaacaatttcaatctgacactctattagaatgttatattatgtaaatatgttaattatcagacatacttccttggttctaaaacctatatccctgttctaactcatgaattacaaaccaaaacattaagtaatagcagaaatgtaagaaaataggtatatgatttggttaagcccattgattacattagcaattaaagtaaaagaggaaggcaaacttgtcatcacatttctaattttatcatataccagacatactttgactgtctttactatcattttgctctttttttcctctctttttctgtaacacactacatttatgtgttagtggtaatggcttataacacattatttttcccttcatatctatggaatattgattctagtttgttgttaactttgaactagaaaaaatgatattcagatatatatgagtatatatgtgtgtatgtatatttgtatgtgtactaaatttcacagactgcatgcatatgttttaataaatcagaggggctcacataattcatctaatcagttgtctaatcttaataatagagaaacagaacccaagagaaattatatccacaaatatattgtgaaagtgttattaatgaatgtgatcattatatgttgagttcaaagacagctcttttaaaaaagccaaacccaagattctgtttttcacatgattgtaacagaattagtacacaatgccaatacatgactgaatggaaatcagcatattccttaacatgctgcagtcagcattatataggagacacctataacagcayttacttaaaaaaaaagctgcaattgtttgtggatatactcatattttttttttcctttcaccagaccaatgctgactttcagttctattgatctaacatttgtgtttgaactagaacatgcactgaaaatgttggattccatattactgcctatactgatttttattgtcaggtatctgtattactgactctacacacacagacacagaaataattataaatgtccaatgtagccaccttttaatttactatcctaacatgtattccgattagtactttaaaattstttttctcagactttggtattcatcctatgttgatataagatagttttttcattttcttctttacgttcgtatctgttactattagctgctgtatggagtatgtttaatacaataaaaaataaagtgatacctamaatttataatcagaataaaatgttaccatctttatacatcttttacactaatatgttttctacaaagcagtacagttttattttagacatatgttcatgatgtttcaaaaacaacaagaaactatcagaaaaatgaaaaataaatttgaattgatatatatatgagtgtgaatccctttaaaaatatagatcctatacatatttataagagaaaaactttagaaactctgatttttattattctgttgtttcaagctttcaagttgaatcgagtttttctttgatctaaaaggcaatttatttttatcagatactaattgttttaaaaagatttaatttgttaatatactttaaggattttgtgatatttttaataattaaatgcccaataagagttagaataaaaaattaactttaccgtcaaaaaggaagatctcctgcaccctctgctgctatgtaaatgaaactgcaggttatttattataaacttatttttattttataaaataaaaaaagaaaataaaaaatttaagaagattttttaaagatcttttcaaagattttttaaatttaagaaaataaaaaatttaaagaaaataaaaaatttaaggcaaatccagtcattttaatatacagtaaacaaacgaaccattatagatgtctcaaaagaacatgcatctcagatatrtagtttacttaaaaataagtaaaatataaactgacaaactagctttgaaaggaagaggtataatggcatcaatttgttattaatgagaaaaagtcataatgctacatacttctaaatcatcatattacttaaatttattaaccaacatacaaaaatctattgtggtttattgtttgtaatatggaaatattaaacattaaaaagattgtgaaaaacctggagtgaattatttgtgtcttatggctcactgccattttagatgaattattgtgttgttaaaataaattgactttttttctaagaggcaggaaatagcttgcaatagtgaaaccagatagaatccgagctgttacaaaagttgatcccaatttataaacagataccayttggattgaaaatctatataaagtataaattttactattaaaatgtagtttaataaaaaatagtcttgccgggcgcagtggctcatgcctgtaatcccagctcttagggaggcagaggcaggaggatagcttgagcctaggatttgagacctgcctgggcaatatagcgagaccccgttctccataaaaaggaaaaaaaawacaaagtctttatattattttaaggattcttagcacttccatatgttttatttatttaaatattttatattaaactataaaaattgaagcagttattaaaacactaggaattgatgtttgtattttgtcgaacttggtgaaattatttttagaaaaggcattttctgatatgtccaatctcctattccttcccagtggaaaccactgttaataatttttgtgtatcttccaagttgcttttaagacatttacatgcgtatttctatatccttccatattttgtagtttttaaataggctatatatctcatactcccttattttgatttttaaagtcttaaatataaaagtaattcatgaattcattctgattgttgaagcatcgtattacatataacaccatgtccccgttgacgacaacctcaattcaaaggccctctttaagggtaatcactgttaatgctttgaagtacatccttcaagatttttttcaggaagaaaaaaaatcatacacacatatgattctgcagagtatttaatattatacatactatttgataataaattttgaattgacataaaatgtattccgaatagtatatcacttaccaatttgattttattaacacaatgccttggaaatttttcctttgtttgttcatatctttgaccttatatgtttagctcttatatattatgctgtggaataaatagaccatttttagaattttaaaaattctcatattaatgaacatttatattattttatattttcactacaataagcctgagtatccctgtacatgcttctttgagcagatctgtgagtattattctagggtaaatgctgagaagtagaattattttttcattttatactttgataaataattttaatttttaaatgactttaacaatttggatttctttgtaaatgtctgtccatatatactactttttcaccaaacctgatattattaagttttaaaaagttataaatgaaaaatattgtatttatttctggttgataatggagttgaatatctgctcgtaakgttgattagtgatttatatttccttttctataaatttcctgttactattctttgctcccttttattctttgtgttttctgtttcttactggctcataggagttctttctatttccccgattactaatgagtttgagtattttaaatatatattcattggtgatttgtatttcttctttcaggaattacttgttcttattctttgctcacttatttttgattttagattctttttcttattgatttatagttctttatatattccagatattaattatctgactggcataggataccaaagaccagcccctgtcttaatgtatcaattagtgctccagagctttcccatgggatcagtctgaagctagtgtccagttttgaccacatcctggcttagcttcttatccacatatccccagtgtccccatcttattagactttctttctttaatcagcttctcatgtttgaacaagaattccttactcaggctctgcttctaggaaatctatcctggacctgtgatgacattttttttgaaatcagtgttttaaaatcaagccaattctccaatggaagatataattataaaaaaaaacaactgctctttactaataaacatatattttaagatgtgtgctatcctctttaaagttgtatttttgttatactgacattgccaccgctcaacaaatttatcaaattcagcttttggaaatcatgttcagactctgagacagtctttgaatgttcataatattgtcmgttctttgctccctgactaaactattttgttgacagtgaacaattattcagtcatgtgcagtcaaagtgatcaatgtggtcaaatattttgaaattatttgtaacagacggttttaaaaatgagaagtgtctgttcatatcctttgcccactttttgatggggttgttttttttcttgtaaatttgtttgagttgtagattctggatattagccctttgccagatgagtaggatgcaaaaattttctcctattctgtaggttgccggttcactctgatggtggcttcttttgctgtgcagaagctctttagtttaattagaccccatttgtcaattttggcttttgttgccattgcttttggtgctttagacatgaagtccttgcccatgcctatgtcctgaatggtaatgcctaggttttcttctagggtttttatggttttaggtctaacgtttaagtctttaatccatcttggattaatttttgtataaggtgtaaggaaggcatccagtttcagctttctacatatggctacccagtttccccagcaccatttattaaatagggaatcatttccccattgcttgttttcctcagatttgtcaaagatcagatagttgtagatatgcggcattatttctgagggctctgttctgttccattgatctatatctgtgttttggtaccagtaccatgctgttttggttactgtagccttgtagtatagtttgaagtcaggtagcgtgatgcttccagctttgttcttttggcttaggattgacttggcaatgtgggctcttttttgtttccatatgaactttaaagtagttttttccaattctgtgaagaaagtcagtggtagcttgatggggatggcattggatctataaattaccttgggcagtatggccattttcacaatattgattcttcctacccatgagcatggaatgttcttccatttgtttgtatcctcttttatttcattgagaagtagtttgtagttctccttgaagaggtccttcacatcccttgtaagttggattcctaggtattttattctctttgaagcaattgtgaatgggagttcactcatgatttggctctctgtttgtctgttattggtgtataagaatgcttgtgatttttgtacattgattttatatcctgagactttgctgaagttgcttatcagcttaaggagattttgggctgagacagtggggttttctagatatataatcatgtcatctgcaaacagggacagtttgacttcctcttttcctaattgaatgccctttatttccttctcctgcctgattgccctggccagaacttccaacactatgttgaataggagtsgtgagagagggcatccctgtcttgtgccagttttcaaagggaatgcttccagtttttgcccattcagtatgatattggctgtgggtttgtcatagatagctcttattattttgagatacatcccatcaacacctaatttattgagagtttttagcatgaagggttgttgaattttgtcaaaggccttttctgcatctattgagaaaatcatgtggtttttgtctttggttctgtttatatgctggattacatttattgatttgcgtatattgaaccagccttgcatcccaggaatgaagcccacttgatcatggtggataagctttttgatgtgctgctggattcggtttgccagtattttattgaggatttttgtatcaatgttcatcaaggatattggtctaaaattctcttttttggttgtgtctctgccaggctttggtgtcaggatgatgctggcctcataaaatgagttagggaggatcccctcttttctattgattggaatagtttcaggaggaatggtaccagttcctccttgtacctctggtagaattccactgtgaatccatctggtcctggactctttttggttggtaagctattgattattgccacaatttcagctcctgttattggtctattcagagattcaacttcttcctggtttagtcttgggagggtgtatgtgtcgaggaatttatccatttcttctagattttctagtttatttatgtaggggtgtttgtagtattatctgatgttagtttgtatttctgtgggatcggtggtgatatcccctttatcattttttcttgcgtctatttgattcttctctcttttcttctttattagtcttgctagtggtctatcaattttgttgatcctttcaaaaaaccagctcctggattcattaattttttgaagggttttttgtgtctctatttccttcagttctgctctgattttagttatttcttgccttctgctagcttttgaatgtgtttgctcttgcttttctggttcttttaattgtgatgttagggtgtcaattttggatctttcctgcttcctcttgtgggcatttagtgctataaatttccctctacacactgctttgaatgtgtcccagagattctggtatgttgtgtctttgttctcattggtttcaaagaacatctttatttctgccttcatttcgttatgtacccagtagtcattcaggagcaggttgaatttaaacccagctgttcttgtatcagagtctgaattcttaacagttatgcattcactgtgtctaaaccttagtacatggaaccgtaagattatttaaacataaatatgcctcttattatttacttaagcctgggtcatatgcttttacacttctttcttcttttaccactaacttctttctaaatctgaccaaagcccatctttctctatttctcttttctctctgtttcttctggtcattaaaaactaagattgtatctggctgagtatcaagattacgtatataaatgtgtaacttatgtctttctaaatatatatcatcatcccttaattaattaatccaaacgactcatctgctttcctaaatcctgctagaataatttctttcaaatgtgttcttcccttttgtagcttttcccattgtcatgctacttgcacaccactcaccctctttctctttttatctgggggattgatttatacaaatctaatcagagacagtctgtctttgcttatataccatgttttgtgtcaattcatttttaggagtgacccaaagactgacatttcttatataagcaattatttgttttggttattatgtttatttgttgagaacaacttagtgtactcaatatagctaaattatatacaaatttaataaattgttaattaaacatatctaatcaattatgtgatttctggctttttctaccttaggctgacaatctcattctcttttctgtgactgatcatccacttggtccagattagccatccttttaatgtgtctcatattctcctcactgaccttactggcagaagtggctttcgtcattgttgtgggagtcatttagctgttaaaagtgcctccattattttcccatttatttaaggggaaacagcaaaacattttggaaatgcatttagagataaactgaaaaagtgttgagatgtagatagcatggtctttctagtagaaagagcctggactgcaagaatcctcacaagtgtgagccctgtttaaatctgggttaaatgatataattaggtaagactgggaaattacttcaagctgatatcctacttattttagtaaaaaatgatcaatgtcctttgatatgtttacatattattaattttctgccatcattttcttaatgttaaaattattacctaggaaatatctgttgtttttttggggatcttcttttattttcaccaagtataatggaagattttctttttagtgtggtcattaaggctctaccaggttattttctgaatgtttttctgagaaagaatcttgctgggaccagatttaacttatgcagcattcccctaaacacttcaagtattgataatttgttttcaaatgccaataaaaatataaatttagggactttgattacaagaggtcagactactgatctcacattatatacgtcttttcagtattattttatgtcatttttaatagactggttgggacacatgttttgttaggtagatgattttcataactattctaagagctacaccaccatgtacctcttgtttgaatatatttcctcagaaaaggcagagctctatacctaatctgtgccaagcagtgtgttagtgtctttgtgatgtagtatcttctcattcttaaaaaactctataaaataattattattgatgttccagtttatagtcttagtaagtggtagtacttgcatttaagtgccaaccaactgcatgtgtgcgtaaaaagtaattaagagagacaaaaatacttaggattatctcatatatgagaccaggtgtcatgtcattagctctgactcataatgaaaaaatatgaggggtgtccaaattctaggaaaatatttgaaaagcaatgagaaagaagaaaagcgaaggcaattttgctttccttttacctgtacagacagatagacctatttaagtgtatggtagttagcttccaagatgatacagctctgaaaccctgcaggactgttttatgctgttggttaatgtatgcatttggaatcacaaaagaaagagtatttgttttttgagacagggtctcgctctgtcacccaggctggagtgcaatggtgctattgtggtttactgcagccttgacctccaaggctcatgtgatcctcccacttcagccttccaggtagctgggacaacaggtgtgtgccaccatgcctagttaattaatttttttttctttttttctaagagatgggttctccctatgttgctcaggctggtctccaacccctgggctcaatttatcctcctgcttcagcctcccgaaatgttgggattgacaggcatgaaccagtgaacccagagaataatttttaaaatgtcttaattatgtaatatattttacttttagtccaactttaagtaggtaacatattaatgatccatatccaaattatgaatcatttaactagaattcatgtcttcttcaaccatatcaaataagaaatttgactctaattttatttagaatagatcctcctataatgtggtactctgttcagggtaatgattgtgtttactaaagttggagaggtcattgaataaagtactgtactttctggaagccttttgttaaatcctggtgctaaagaacaaaagtactgtttcttcaggttgccattgtaaatttctaagagatcaaactgagttttatttctaatagggtctgtatacatttgtgtagtagtattgtcttcaagttaatcttatcttttgtttatttacatagcattaaagttataattaaaaaacacttctcttatgtaacaaatttgttttttcaaaataaaataacgtttatggtaataaagacccctagataatggataggtctagttcaaccttcatatttttaagacctattattattaaagtgactatgacttctgaattgagaaatattagataagaattgagaaaagatgtttattttatccaatttggaaatttataaaaatatatacaaggtttgctaagggattaaaggtaactgttataaaaacattgtagtaaaaagaaataaaattagcagttatgatgttgttacatttatctttcatgaataattgaagttgctatgatgacatattgtttcattaaacttattcagcattattttttcatgttttcaactgtttattagcaaatttcagattattgaactttttacagtttggaagacttttaataaatatgcatctctaaaagttgtaatttagcataattaccctcaggattataagatttattcatggcagtgagacagaaaatatatttatgtaggtttgaaatcctgaagtgttgaagctaaaacttcattttttaaaatctatgtattctataggtacaaattgcgtattttatcaggcactgggtattaaagcaaggagaaatggtttttggcattaagaagcttaagacaaaatagtaaattgagataaatatacagatgcttactatgtaagctaatacttgaggatatgtaaaggaggagtaccaggtccaaaatgagagacagtgggaatggggtgtcaggtagggaaggagtgtcagggatggcaacttggaagaggcaatgttataatagtaggaggcttttgccatggagttacaggaagggcatcccaagctggtggacccaaatctccaaaggtcttgaaggtgaaagtgattagaatatggcagtcatgaccaagtgcagtggctcatgcctgtactcccaacactttgggacaccgaggcaggaggattgcttgaggccaggagtttgagatcagcctgtgcaacatagcaagactctgtctctatgaaattttttttaaagttaattgggcatgatgctgtatgcctgtagtcccagctacttgggaggctgaggtagaaggatggcttgagcccaggaattcgaggatgtagttaactatgtttgctacactgcattctagcctgggtgacagagcaagaccttgtctccaaaaacaaaacaaaacaaaacaaaacaaaaaggaagaaagaaaaggaaaaggaaagaaagataagaaaatggcagtcatcagtgaaagcggagcatgaagtgtgacgagaggactaatgaatctggagatgtagacagcatccaagccttaaagagccttcctaaagaatatggataatcttgacctatagtctattttcctcttatttrgctgagaaactctcaagggaaatacaagttcatattaaaaataaaagacatgtgaaggatatttacctctagtagatttatatctactccaggttattcaataatgtgcagatatcttttagtatctatgatgtttttacttaaagaaactaggacaaacatatcactgacctaaatagattatttgtgcccagtggaagtctggtggttttcattaagtatttaggagcaagagtgattttaaaattgctgccaatgactttctttacagaattggaaaaaactactttaaagttcatatggaaccaaaaaagagcctgcatcgccaagtcaatcctaagccaaaagaacaaagctggaggcatcacactacctgacttcaaactatactacaaggctacagtaaccaaaacagcatggtactggtaccaaaacacagatatagatcaatggaacagaacagagccctcagaaataatgccgcatatctacaactatctgatctttgacaaatctgagaaaaacaagcaatggggaaaggattccctatttaataaatggtgctgggaaaactggctagccacatgtagaaagctgaaactggatcccttccttacaccttatacaaaaatcaattcaagatggattaaagacttaaatgttagacctaataccataaaaaccctagaagaaaacctaggcattaccattcaggacataggcatgcgcaaggacttcatgtctaaaacaccaaaaacaatggcaacaaaagccaaaattgacaaatgggatctaattaaactaaagagcttctgcacagcaaaagaaactaccatcagagtgaacaggcaacctacaamatgggagaaaattttcgcaacctactcatctgacaaagggctaatatccagaatctacaatgaactcaaacaaatttacaagagaaaaccaaacaaccccatcaaaaagtgggcgaaggacatgaacagacacttctcgaagacatttatgcagccaaaaaacacatgaaaaaatgctcaccatcactggccatcagagaaatgcaaatcaaaaccacaatgagataccatctcacaccagttagaatggcaatcattaaaaagtcaggaaacaacagatgctggagaggatgtggagaaataggaacacttttacactgttggtggaactgtaaactagttcaaccattgtggaagtcagtgtggcgattcctcagggatctagaactacaaataccacttgacccagccatcccattactgggtatatacccaaaggactgtaaatcatgctgctataaagacacatgcacacgtatgtttattgcggcattattcacaacagcaaagacttggaaccaacccaaatgtccatcaatgatagactggattaagaaaatgtggcacatatacaccatggaatactatgcagccataaaaaatgatgagttcatgtcctttgtagggacacggatgaaattggaaatcatcattctcagtaaactatcacaagaacaaaaaacccaacactgcatattctcactcatagatgggaattgaacaatgagaacacatggacacaggaaggggaacatcacactctggggactgttgtggggtggggagagtggggagggatagctttaggagatatacctaatgctagatgacaagttaatgggtgcagcacascagcatggcacatgtatacatatgtaactaacctgcacattgcgcacatgtaccctaaaacttaaagtataataataataaaaaataaaaaaaaataaaattgtttaaaaatgtttytcattagttgaatcctttgaatacttgctaaagagttatgggactgactctttcatttactgttgttgttggtgttttttatttttttttttgagacagagtgtcactctgtccacccaggctggagtgcagtggcctgatctggctcactgcaacctccgcttcctgggttcatgccattctcccgcctcagcctccctagtagctgggactacaggcgcccaccaccatgcctggataattttttgtatttttagtagagacggggtttcaccgtgttagccaggatggtctcaatctcctgacctcgtgatctgcctgccttggcttcccaaagtgctgggattacaggcgtgagccaccgcgcccggcctcatttactgttaatgctgatccaaatgcaggaaatactttaaaaatggccaataaatattttaatatacataaatttgagtatttcagtaatgatggttgacatcttgacattcatgcattgaagtctgtaggttcacaaccagctgcaaatcattatggttgattatattctaattagagcaaaattcttcaataggcattgaatggaaataaatgttgtatataagtgaaaaatatcgtggctgtaagtgatgttagttaaaccattttaaagaatatagtcatgaaaaaatgtattattcattgtatacactttggaaaatctaagctgtgaggaaaatcacacatttttatttgtgaaaaattgtaagagctaaaatgtctgtttatgttttaggttttcttcaagcaaagccttacaagaatactgaaatgttttggagtgtttcacatatagtttgatttaaattcaaattcatatggagaaaagggaactcttgcacactgttggtgggggtgtaaattagcacagcctctatggaacacagtatggaggttcctcaaaaactaaagacagaactaccatatgatccagcaatcctacttctgggtatatagccaaacaattgaaatcagtatgtcaaagagatatctgtactcctatgcttattgcatcattattcatgatagccaagatatgtaacaaacctaagtgtacatctgtggatgaatggattaagaaaatgtggtttatttatataatgaaatgctattcagcctaaaaaagaaattctgtcacatgtcacaacatggatgaacctggaggacattatgctcaatgaaataacctagacacagaaagacaaatattgcatgatctcagttatatatggaatctaaataattaaactcatagaagtagaaagtagaatggctaccaggccccaggatggaaggaccgggggctggggtgtcggggccaggggaatggggaaataatgttcagagggtacagagtttcagttagacaggagaaataagttttagaggttgattcgacagcatggtgactatagttaataataatgtactgcatatttcaaaatggctaaaagagtagattttaagtgctgtcactacaaaaaatgatatgtatatgaggtgataagtatgttaatttgcttatttcataatataaaaatatcaaaacatcacgttatacctcataagtatatacaattgtcatctgtcaattaaaaataaaatcaatttttaaaattaaattcattgactgtagtgaaaaatcatccatyaaaaatcttataatacaaatatgttagattttatgttgtttggagaaaaatattaaatacttatgaatgcatatctgaaagcaaatatttgtcatttttgtcacatacttgttcaaggaaatgaaagtattttacttgatcagttctcatatttatcaggatgataaaatagaggattttaaattttgtatagtatttgttaatttttagtcacgtagttttggttgtaaagactaagaaatgaaacagagtctgattcaatttacaaagggagagatcgtattacagttgaaggattaagcaaaactcataaacaaaacagcaaccaaatcaggtacagtttaaaaatcagtgaaaaatggcagtcactagaatagcaatatttgctgtacaagtttgaatccttgatgtagaaacatagctgggccttcattcagcagtaggagttcatgactaattactttagtgaatgcagtatgtatcatgctgattatgagctgaccctgtagggttttttattcctgctttaccaggtgttggctgaatgacattatgcaagttgcttttctgttgtaaaatgttcatagtcttattacttatttctagaaatataaggtgtgaaagagataatctgtgggaaagtacctggtacgtagcagttgatgagttgtagctgccacatctcctcactcgtgtcctcctcctcctttatcttctccattgataccctgaatatactgacattaatatggttcataaatgttctatgcttctgattctctcagtatgtattgtcacttctctcaaggttaccaactgtcttagtttttactcaagtattttcttcaactgatacctgtggttctctcataagtttaacttgtttataaccctatgttatatccttgtgatttagtttcttcttctaatggcctgcttatctctcagcttcccaaaycaaacttgtcctggggtggggggaggggggagggatggcataagagaattacctattgtaaatgacgagttaatgggtgcagcacaccaacatggcacatgaatacatatgtaactaacttgctcattgtccacatgtaccttagaacttaaagcataatttaaaaaaaaaaaagagaagaaaaaaagtctatagccattggcttttctttgagtgctgattgtagtgtcaggctataccattgtcttgtttgtgattctgttgagctcacgtcagtaacttgttgagtcgtgtggtgtaaaatgaaaatacttctagtggtctctgacaggagtcatggtggggcatttacccagacagaaatttttatgtctgtcacgtgcctactgcatctaaataaataaacataaaaagttaagaataaacagtttaccaaaattatggaacagctataagtaggaagtctgggtcttaaatacctggtgtctccaaagccaacactcttgcataaactttaaatatttctgttaatcttaaaatgtttgcatcattacaaaatatcaatactagctattgggtcatttttactacttataaattcaaaaaatctttattaggtatcagatttttgttatttatcgtcttagtataaactaaattctattttgtgtctygaaaagcaatattttgttttaaaatgtattatttgtagttgaattctattgacttgttgtttttgttttaacctttctcaggctgcaaagttggctttcacagtgcaagcctttgaktcccaatgggggactcaggatcaagacgatctaccctggtctcccggttgccaatattcagaagaagtattaacagaagacatgattctcttccttcttcaccttcttccagtaatacagttggtgtccacagttcstctccttccagcactaactcaagctcaggtagcacaggtaaacggaggagcatattccgtactccttccattagcttccaccataagaaggggagtgagcctaagcaagagcctaccaaccagaaccttagtatttcaaatggtgctcaacctggtcacagcaatatgcagaaactgagtttggaagaacatattaagaccaggggaagacattctgttggttttagtagttcacgaaataagaagataacaagatctttgacagaggattttgaaagggaaaaagagcactcaactaacaagaatgtctttataaattgtctaagttctggcaaaagtgaaggggatgattctggtttcacagaagaccaaactcgtcgttctgttaagcagtcaacaaggaagctactccctaaatctttttcatctcactataaattttctaagccagttctacagagccaatccatttcattggtacaacagtctgaattctcattggaagttacacagtaccaagagagagaacctgtattagtaagagcttcgccatcctgttctgtggatgtaacagaacgggcaggaagctctttacaatctcctttgctttctgctgatcttaccacmgctcagacaccttcagaatttttagccttgactgaagattctgtgtctgaaatggatgcattttctaaaagtggaagcatggcatcccactgtgacaactttggccacaatgattctacctctcagatgtccctcaattctgctgctgttacaaagacaacaacagaacttacgggaactgttccctgtgcaattatgtctcctgggaaatayaggttagarggtcaatgtagcactgaatctaattcattaccggaaacctctgctgctaatcagaaggaagtgttattacaaattgctgaactacctgctacaagtgtgagccactcagagagtaacctaccagcagatagtgaaagagaagaaaatatagggttacaaaatrgtgaaacaatgctggggacaaactccccaaggaaacttggattttatgagcaacataaagcaatagcggaacatgtaaaagggatccatcctatttcagattcaaagataatacctacttctggtgatcatcatatttttaacaaaacatcacatggatatgaagcaaatcctgccaaaggtatgctgattttttttgtataacaaatgatatgaattaattttcattatactttattcagttttcttattccatctcatgaatggaaaccacatttttcttgtttttcactttcgaaatggtttcctattcataatttgtgttaaatgtttcccctgcttgattttaaacttacatcaattgtgttatgctgaaaatgtaattcagcaatattactcattttttctcacttatgttatccataactaagaagcagcctcttagttacggtgtttattggagcaccttcagaagaaagtgaatggaaagtaattgtttgcaatgtggatttctccaaagtaaggactgtcttttatagagtttattatagaggcattggtatttcttatttaatgaaatggatatattccagctaaaatcactataaaatttgtataatttaatacgaattttataatttcctttgttaactaagctttcattattaattaggatccatgtttcaacataaataattcctatctctagatacaataacagaattgtaagcttaaaaaaacctatctttggaagctggagacaggtttcaactctgcctctgacattaactaactgtgcaactttggacaccttccctttagtttaaaaaaagtgttagtatatgtccattactgtaatatggctacagaaaactttgtttttttaacatgaaattcagttcaagaaaatttttgaatatataccacctgctgggctatctttgacatattttaattcctttttctctactatcattaatgctactactgctactaataattttcccaaatttggaagtgattattatgtcctagatattattctgtatactttatatacattaattaaaatgattgaaattgctactattattataagctattttgcaggcaagaagatgggagcaaagataaactgtgtgtccacaatcacaaaactaataattcatttattgggatataaatcctatgaggtaggctcctatgtttcccattttacaaatgtgaaaacaggctaaagaatcatacagctggtaagtagtgcagtcagattacaactctctgaatccaaagctctggctctccataactatgctttactacatgtcatgacttaaaatattaaataaaatttatgtgacataatgtcacgagtaataggattataaagtttatccataaacatagaatttcaragttttaaatgcatgagttaattttccagctgtcttaatacttttctcatttgatacaagatcacttttatgcacgtgaccatgtttgtccatttttggaactttgtattctttagtcatatatgcctagctcctttacctgtaatataatcatgagaatatgataatgatgatgatattaatgatggttacccttttgtataattaatatatgcccaaaaatgtactaagaagattgcatgcactgtttcatatagtccttataaaaattttgcatgtcatgttaataactaaaatttataataagttaaataactttatagggtcacatagttagcaaatgatggacttgatattgaaatccaggaagttttaaaattatataaaaaagagatagaaatgcaattatcctgacatatctaattcttatttagtaatgatgactttcctcaaagcctaattgaatactgcatatttttctctctctggaaattagagaatgatcagttatcttggagactattactatgttgattgggatcctatttgtaacacaataacacattaattttgctgatttgataatgtgttggctgttcttggataaataagctggtaatgtcaacaaactaaactatcctttagtttttgaaaatattcatgtgctatttataaggattttataattttgaagtttaaaattttaaaaacagctaagtaaatgtattttatccaataaagagttgctatagacactaactttcataatgctaaatttagtttgtattttgtatgaaatatttaagccagtactttatacacatctaagtgttctaggtgtacaatcatgtcagaactaatgagttatctggcaatttaacttttattcattgtcttaaaaagttatttaaaaagaactgctatatattggactaatagattctggacagtctttaaactagtagatgagcctaattagaacaattttttcatttactsattcattcattcagcaaatatttattgttttaacactatgttaggcactagggatgtagcaatacacaaaacaggcctagatccctgccttcctgaggcttactttccactggggatactcagttaacatgctatatatatcagatggtgataactgctgagggtaagtttaaagcagaataaaggcttaggaagcagaagtgggattccagtttgcatttttaaatgtaacaggatgatacccaaggtaacatattggtaaaggtttgaaggaacttaaataataagtcatacagatatttgagagaaatatattagtgcaaggttgtgagtcaaaggctgtgtagggctggagcatgccagtgatgtaccagagcagcaagagtccagtgtggcatgagcagagtgatggaggggagagcaggacatgagattgcagaggtgagcaggtgaacagggtgctcctcctgtccctggtttggggacagagagagcagtcatatgggtcatattatgaagaatttgttatgccatttgaaaaacatcaccttttggctagaggagtggtggtgatggccctcacttatgttttaagtatatgattctggctactatgtggaatgtagattgtgttgcgggtggagaggcagatgagagtaggcagaggtaggagaattgtagcaaatattgcagtaaccaagccagcatagatttggtccagggtcttagaaggagaggtagaaggaatcagattctgtatacagtttgaaggaaataaggacaggattcatttatgtgattaatgtgagcaacgaagcaacaaaggatgactccaaacgttttgggcttcaaagagattacatgattaagtgaactaaactgatgctatacatttaaaagttttcttgtgatagagaaactttgaataacactaagagtttttcatgatctttcagtgggacatttgtaaaaactacatttaaatatttaccttcatttttatttattttcctttccatagttcttgccagtagtctcagtccatttcgtgaaggaagatttatagagaggagactgcgatcctcgtcagaaggcactgcagggagtagcagaatgattttgaaaccgaaagatggaaatatagaagaagttaatagtttaagaaagcaaagagcaggttcttcatcttcaaaaatgaacagtttggtaagtatatacatatgtctgcctctaataaaataatgctgtctatatccgrcatgttcatgtctcttgcaaaatgaacacagactacaggatagacacctcatatttgaagggaaaatttgtttccatagttgacattacaagtcagagaaacaaatttttcacctaggtcaggatggagttcaccatgacagctgtctttagttcctgtcttccttgcttccatggaaagtttgacattctttattctagaacaagacacttgaatacagaaactagggaaaatgctgaacatgaggmtcccctttgacaccattatttcacatcttctctccaccatatagccctccagaaaatacccttttgtaaatcacacttactccagtaccactcttagtccctgtagaccctatcctcgctgtcctcctgcagtgcccttccacaaagggtgaggagttggtgtgaagcttatgaggaccaatgtgaaatgcccatccaatgcttgcatacattggaggtaatcaagataccctattcctggtccaaattgtagagcctgcttttagtatgagggtggaggtggggtgtgtggggagaggcatggtctgagtttgtatgtgtgaactagggtgtcacagaggcattagtatgaagctccctcatggtatgagatggacccaggggtgggaagagatgaggggcgaactgcagccttgggtccatgtggcctcaggtttcacaagtattagagtgtgattgccttttggagatcactttgctmaccttctcacaaatgtgtcctttttcagcagtgtatttaacatctattatctaaaaatgttccttaaaataatctttctacctacctatccatgcatatatgtgaaaaatgctcaaaaataaatcacttatgatatctctattgttttacataattgggtttcaaatgaaaatattaggtaattgagatctgataattattttgtgaagaagccttaagttagtaaggtaacattgtgtgatagcaaaatcactgtgcttgatgttagaggttttaatcgtttttttctggtgtgaccatttcttaatcctgggcaaatttgtaaccacaaaatagcaagtgataataggtgtcttgtttccattatactaaagaatgactatgtgagtatgtgtttacatttgtacatatggaaacatatatttcatgcttcgttttgttcttttgtgcattggctattatattattattgttgcagtggatatttttggtctaagtatgaaaatatgttaaagcggatttccaattgatgcaccattaaaagttaggactaatgaagtattacaaaacatttatcatcacaacattttcagtatttcttcatggagaggcatttatattaatagggttacactattcaacttgctcaaagttgtgccttttacatattctctcatatctcatgtgtttttcatactgcatttaatttaaataattctagtttgagacaagcctaggcaaaatattgagaactcatctctaaaaaaaaatttaataattagctagaagtggttgcacctgtagttccagctactcaggaggctgatgtgggaggatcacttgggtccaggagttggaggctgcagtgagttattgcaccactgcacttcggcctgggcaacagagcaagacctggtctcgataagataaataaaaaataaataaataaataaataaaatgtaaaaagtgcttcttataatatcacaaagtcactcttctcagatttactttttttttttttttttttttttttttgagacagagtctcgctctgtctcctaggctggagtgcactggtgcgatctcggttcactgcaacctctacctccccagttcaagcaattctcctgcctgagcctcccgagtacctgggattacaggcacctgccaccatgcacagataatttttgtatttttagcagagagggggtttcaccatgttggccaggctggtcttgaactcctcctgacctcaagtgatccacccgcctcagcctcccagcgtgctgggattacaagcgtgagccaccacgctcagccctccgatccgcttttaagatttaaaacttaagaaacaaaagtggttttgttcctttgaggccttatatttaaattttcaaaagtgtgcctgtagtattatagtctgtccactagatggcagaaagacaccactgccgtggtggtggacagtatatcagggttggaacagaaacttggtaaaatattgtacatgttcattggatttacagatgaaacttactgaaataaatactgaaacttttgaatttcctaaagagaactaccaaaaactacttcacgatcttaccatcttcctttggattttacaagttatgtctcatctttcagttactttacagtttattcattttttattttaatttttaatttttttaaggcagagtctcactctgtcacccaggctggagtgcagtggtgcagtctcggctctctgcaacctcccctccccggttcaagtgattcttgtgcctcagcctcccgagtagctgggaccacaagtgtgtgccaccatgcctgcctaatttttgtatttttagtagagatgtggtttcaccatgttggcctgattggtcttgaacacctgacctcaggtgatccactcacatcacctcccaaagtgctgggattacaggtgtgagtcaccgcacctgagcagttacttyacacttaattaattaatttaaaatgcatgaaatatgttttttaacttgtagcactgtaaggaagaaatggtagggattatttagttctagatacatgtgaaacaagtgwtgtatatttggaaaattgtagctgtctgtgtgaacactggcacattttctatattcctcttccaaaataatttaagcaactgcatgtatttaagaatgtatccatggttcagttattttattttaaagcaattataatagaaacatgtgtttttaatgcttgttkgaaccaagtgactacttttaatgcctgacatgtattatcacattcagtcctcacaacagtactatcaactaaatgattctgtggtgatcaaattttgcgaaagaggaaaataaggtactgagaagataagcaggttgcctaaaatgacatagctcataaatggcagagataagatttggatttggatcctttctaagttcaaatcctacaatcttttgggaaaatgtattcgatttaaaattaagttgagccatttttcaattgtttgcatcaatttggtgtaatgaaattaaaacatttaaagcaatctaaccttgcttgctctaagtctaggctgcagcattctgtaagagatacaaaagaggaaaacagaaacaaaatttagtgcttaatctgaacttaaaatgcggtcatgtttcttgaaatgctgatgaatagtatcaatgtccttactgagagatatcccatcaaaaaggaactttgtcacaaaagaggatattcatacttagcagttttgtaatacttctttactcctaacttttaatgttagcattaatgcagcccttcatgtagttcatggggatttcaattctcataataaaatatggctctatttattaagatgctgagcatttcctgaaagaccgaagatattacctgatggattagatatagttagatataccacagttctgttgtttttgtgtacttctggggtatttcaatctggaagcgaaaggacaggatgtatgaactcttcaaacatcaaatgccgagaacaaattgggattggcttaggtttattaaaggaatccaaagtaaatttggaacaatttgataagtgttcacatttattatattttttcaaacctctttatagtatttttccaatttttctctaatgagtagctttctgaatacatttcttgcgattgtccaaaaaatttaaaatgctgttctagaaaaaagttaaagaacatatttctttaaagaacttacttcaggaagtttctctccagactatggtatataaatgtatacatgtaaggatttctcatgggttctccaatggctttacatagggaattctaactctaaatatttacaagattactctctaaaaaagttaatgtgagagtagattcatatataatgaacaatacagaagacctggtaccgttaaaggaaggaaaaatgcctaagtggatgagtcaggataaacttggctaagtgataaaaaataccgctgggcgtggtggctcaagcctgtagtcccagcactttgggaggctgaggcaggcagatcacttgaggtcaggagttcaagaccagcgtggccaagatggtgaaaccccgtctctatttgcattttgtaaaaatacaaaaattagctgggcatggtggccagtgcctgtaatcccagctactcggaaggctgaggcaggagaattgcctgaacctgggaggtgaaggttgcagtcagctgagatcatgccactgcactccagcttgaacaacaaagtgaaactctgtctcaaaaataaataaataaaataaaataaataaataataacttccaaatctagcgacttatataatatagatttctttctcacttaggctacatgtttattgtggaaggcattggggttctgttcaatgtctcctcctcctgtattcaggctgtggaagcagctaactctgcaaacattgccttttaccatggcaaaaagaaagagatctctggaggtccctgtaataaaatactttgaattgtgaaactcactttcttctgctcacaactcattggtcagatctaatcatatggcccaaactagaaacaaaagcagccaagaataataatgagtttcctgtatctagaggcggagacttaggtttggtgaacacttaatgactcatattcccaaatattttgttgtatccaagttcttttaattaatcgagatttactgmctgcctcctctttcccttttgtccagagtcatttaatgggccctgactttgtgcttcacactgtcctggtctttgtggttgaaaagatgaaaacatctctgtaactgaagaattcatatatactacaggttttattctttaraatattctctcttccttacttaaaggccttgagatgtgtatcttaagtgaactaagtttacttttttccttgactcaaggaatctttactatttttgtaagtatttattttcattgcaccaagcagttggttttgaaggttgcattatcttcagattactcagcaaatgcatttgcaaagttgccctgtactatttgtgctaagtgattcagacaactttcatttatggccaattttactctgacacagcatgttttctttcatttagcatcctgctgcttttatgtggaaactgtgaatgacacagtaaaaacataactgtaggactttggtagaagaacaaatccgatttatatttgattaataagaagtagttagttgcagatcgttagcatctcatatcacatttaattttttggtatgttgaactgcagaatttacttattattgataatagtagaataatatgactgtaccctatttgagatagccaaacactttactattcatttacttttcttctggggcctgctgttttctcatttattagcttatcctttattcattataattcttcatttcttcattcattaaaacattcacagtttcttacaataaatatttattgacaatctgctctgaagaatcaaagatgaaagagacagtgcttgaggatttttgagttcccaaagggagagataaggttaaacattatcttgccaatacaacagatttaaccattttgaccatctctaagttcagaatgggtggggcatgcttcatttggattgtgagcatcgaaatccaaagttaagaagagttaaaatgggcacatgaactcctgtttcccagctttgtctgtgccttatctcacacactcaatgacactgttaaatatatgcataactttcttgtgtcttttgttcatttctctaactgagacccagctgctagtgctgagcaggtttgctgaaagaaagttgggacagtaaagaagaacgtacaaaatgaatctcatgattaatattaaaacaaatcagtctcaaaacaccccacttgtacaatccgccaagcaaaagaatcccactgggctcatttggtatatacaccttcacacttctgtttcacggcatgaaagttgctcaagcttgaaattaaaaacaagacagcctgggtgcagtggctcaaatctgtaatccctgcaatttgggaggccgaggtgggcgggtcatgaggttaggagatcaagacyatcctggctaacacggtgaaaccctgtctctactacaaatacaaaaaattagccaggcgtggtggcacgcgcctgtagtcccagctacttgggaggctgaggcaaggagaatcccttgaatgtgggaggcagaggttgcagtgagccgagatcgcgccacygcactacagtctgggcaacagagcaagactctgtctcaaaaaaaagcaaagatgataattagaagatctgattttgaaaatttcttaatcttgaaatccktaatgagactttccagtatgtaaaaatgttaatggctttggggagttaaaataacgattgcagtttttagtgtaactgactgttaatagaattaaagcaaatattgcttggttacagggacatctaataaaaatggaagccattaatatttttcaggaaatggagccatatgaatcattctcctcaattcttataaattttaaggaagaaaatcacaagtatcactcattaaacatraaattacatttgttgataactggcatacattttaggttaatagccctaatcctttatgcttttatttgtttttccagttactaatcatattttcctttcagtacccttctaaattgtatcatggacrtaacactcaccacatagttatttgaatgtgtctcattttacctgaaaggtttcaatcgtttaaatggaaggagctgtgtatatactggcatttcttgcggtcattaatatagcacctggtggaaaaataggcatctaataaatatgaataaattaaaggtaaaatttctggttaaataatgatacatgtttatatagatgtgaattaaggcttctagtacaagaattgtgtgtggagtgcttatgcacagttttgacattttaacttattattcaaatatacaggtatttcttatgatgcattgtctgataaagctctggcttttttgacactaaatccttgatcaggaaggccataccaattatgacattgttccagtggaagcacaatttattttaggattatcagccttatagaatggtttctaggattatatgagtacgatagttrtaaactggccatacaatgaggacaagaaatagtcaaatatttgtggtattcattaagcccattaaaatataatatcttggtcaaatatgggtaagcgaagatttttaaaatccgctgctattttatctagtccagctcacttcgtttcttataagcttatagattcagagttgcctttagaagcaggattgaataaaaatattccattcatttttgtctttctgaactttgagatgagtcattttcatttagaagctgtcacaatttgtaygtttgttgggcaaaattagtaatagtttattcatacacttaactcacttcttaaatgatttaaagatcggtttgagtaatacttagcacctacattgttacctctgtgataacataatttaataattattacaggtacataataggtggatatatttatggggtacatgtgatattttgatacaggaatgcaatttatattaatactaatcacatcaaggtaattgggttatctatcacctcaagcatttatcatttgtttgtgttagggacattccaattccaggtttttgttattttaaaatatacaataaataattttttcactatagttaccctattgtgctataaagtactagatcttattcattctacataactatatttttgcatacattaatgtccccccaaccctccaactctttccagctcctgttacccatcattctattctgtatttctgtgacttcaaatgttttaatttttagctcctgtatatgagtaagaataggcaaaatttgtcttyccacacttcattaattttatttaaaataaggtcctccagtctcattcatgttgttgcaattgacaggatctcatctgatttttatggctgaataatattctattgtgtgtatgtaccacattttctttatccttttgcttgctgatggacacttaagttgattgcatgtcctggctattgtgaatagtgctgcaatraacatgggagtgcagatatctctttgatatattaatttcttttttccgagtgcatacttagcagtgagaaagctggatcatatggtagctgtatttttagtttttcaaggaatctccaaaatgttctccatactggttgttctactttaccttttcatcaacagtgtacaagggttcccttttctccacatcctgttagcatttgttatttgcctgtcgtttggataaaagacactttttatatgcctgttgtccatttgcttgtcttcttttgagaaatgtctcttcagatatttttgcctatttttaaattggattatttagttatcttttctattgagttgtgttagctgcttatatattctgagtattaataccttgtcagatgggtattttctccccttctgtgggttgtctcttgactttgttgatagtttcctttgctgtgcagaagctttttagcttgatgtgatcccatttttccatttatgctttggttgcctgtgtttttgaggtcttagtcaggacatttttgccaagaccaatgtcttggagagtttccctaatgttttcttccatagttccatagtttgaggtcttagatttaagtgttaatccattttgatttgatttttatatatggcaagagataggcrtgtaggttcattctctgcatgtggatatccagttttccagcaccatttattgaggaatctgtcctttcctccatgtatgttattggcacttttgttgaaaatgaattcactgtatatgtgtggatttatttctgagatctctactctgttccattggtctgcgtgtctgtttttatgatactaccatgctattttggttattatagctttgtaatgtaatttgaagtcagataatgtgattcctccagttttattctttttgttcatgatggttttggctattctgggtattttgaattgttacatcaaaattttaggatcatttttctatatctgtgaagaatgtcattagtattttgatatggattgcattcaatctgtagattgcttaggtaagtgtggatattttaacaatattgatttttcagtttcatcttcagtttactttatcagtgtttcatagtttttattgtagagatctttcacttctttggttaagtttattccagtaaagtttacatattttattattattgctrttgtaaatggtaatgcttaccaggcaaagtctctttttctcttccttcactttcccctaaacagaaggagactctgtggtaaggtggcctggagctgagggaggggtaatgtaagtacttccattgccaccacagctggaactgcactgggtcatgcctgaagccagtgcagtactgggtcttacccaaggtctgtgacaactgctgcatggctaccactgatgtttacgcaaggtccaaatgttctttagttagcaaatggtgaatcctgccaggtctggatccttccttccgggcagcaggttcccttctagcccaggctgggtctagaaatgccatccaggcgctggggyctagaatcagtggcttcaggaatatgcagggtgcttcattttaatgtagctgagctggttaccagttgcaagacaaaatcctctgtactcctccctctcctttcctcaagcaggagtctctccccatgctgcacagcctggaattgggagaggggtgatgcaaggactcccttggctgccacaggtgttgtctcactgggtcatgtgtaccccaagtccactggctccaagtccagtgcagaactgggatttgcccaaggactgaagttcttgtgacctgtctttcaaagttatttgggaccccatgccactttggtcagctggtggtggagctagctggagctcagattcctacccctaggagggaggattctcctctggcaggaggggaaacctctaaatggtttctctgtgagcactggcagaattyggttctgtgttgtgttctcttgtgacaagacagcaccgagtcccaatgcaaagcctcacaatcacttcactctccctcccacaagctcacaaattttctgtctgtgctgccagaggatggagtaatggtggtttgggcaatgcaacagtgtctttcctatcctcttttttttttaaattttattattatactttaagttttagagtacatgtgcacaatgtgcaggttagttacatatgtatacatgtgccatgctggtgtgctgcacccactaactcgtcatttagcattaggtatatctcctaaagctatccctcccctctcttcccaccccacaacagtccccagagtgtgatgttccccttcctgtgtccatgtgttctcattgttcagttcccatctatgagtgagaatatgcggtatttggttttttgttcttgcgatagtttactgagaatgatgatttccaatttcattcatgtccctacaaaggacatgaactcatcattgtttatggctgcatagtattccatggtgtataggtgccacattttcttgatccagtctatcatggttggacatttgggttggttccaagtctttgctattgtgaatagtgccgcaataaacatacgtgtgcatgtgtctttatagcagcatgatttacaatcctttgggtatatacccagtaattggatggctgggtcaaatggtatttctagttctagatacctgaggaatcgccacactgacttccacaatggttgaactagcttacagtcccaccaacagtgtcaaagtgttcctatttctccacatcctctccagcacctgttgtttcctgactttttaatgattgccattctaactggtgtgagatggtatctcattatggttttgatttgcatttctctgatggccagtgatggtgagcattttttcatgtgttttttggctgcataaatgtcttcttttgagaagtgtctgttcatgtccttcgcccactttttgatggggttgtttgtttttttcttgtaaatttgtttgagttcattgtagattctggatattagccgtttgtcagatgagtaggttgcgaaaattttctcccattttgtaggttgcctgttcactctgatggtagtttcttttgctgtgcagaagctctttagtttaattagatcccatttgtcaattttggcttttgttgccgttgcttttggtgttttagacatgaagtccttgcccatgcctacatcctgaatggtaatgcctaggttttcttctagggtttttatggttttaggtctaaagtttaagtctttaatccatcttgacttaatttttgtataaggtgtaaggaagggatccagtttcagctttctacatatggctagccagttttcccagcaccatttattaaatagggaatcctttccccattgcttgtttttctcagatttgtcaaagatcagatagttgtatatacgtggcgttatttctgagggctctgttctattccattgatctatatctctgttttggtacctatcctctttaatgcctctccttcacatgttattaaaaccaggtactatgattgctcacctgacttttggttcttatgaatgtgctttcttgcctgaatatttgttcagtttggtgttccgatgtggggacaatcactyggggttctattcagccacattgctctacctcctacattattaaacttactataaatagtcatgttgtaacaatagcagtatgaaatatgtatgttagaataaactgtacttatttattaagaaaataatttaaaaggacagcagtaaatgagaattagatatcttttacctgtaaccctacgaatctaggatatactttagatattaatagttcatatccctttaaaattaagaagttagaaaactaagattgtttatcttttatttttcaagttatattatttttaattggatcagttaagtttatctcttaattttcygtgagaggacaactgctttgttccttatttagctaactgaatgggctgggacagcttccatagcataagagataatatttattgattcagggtctgcgacagatctctgaccatctgaatagatgcttcacaatttgcagcacagaattgaccttcagtaaactaactacctgttctgaggtgacagtcactggaatctgaggtttgtacattattcattttagacaatgaagacgatttattttatagttattttatgatgttgaaatttaaacacattaaattaacatcaataaattaaataagtcaaagaaattctgactccaaaggtcaagaaatatagtactactgaagaattatattcagtattgaccattagaattaaaaaatatagaaatatctaaatatattcatactctttttaagtaattttaaaattgagacatttataattgtctcacaaactatcacatttgtaatgtaagtgtaaaacagtgtaatttacaagtgaatctgcatatgcaatttcacaatcttcctatgtgatacctttttttttttttttttttttgagacggaatctcactctttcacccaggctggagtgcagtggcgcaatctcggctcactgcaagctccgcctcccaggttcaggccattctcctgcctcagcctcctgagtagctgggactacaggcacctgccaccacgcccggctaattttttttgtatttttagtagagacggggtttcactgtgttagccaaggtggtctccatctcctgacctcgtgatcctcctgcctcggcctcccaragtgctgggattacaggcgtgagccaccgtgcccrgccgataactttttgttttaaactagccgtttctaaattagagtagctgccatttttatcacttttataatctcattcattgattattttactcgtgctaaaagtttgctctgaaattccatatatatatatatatcttctgttgttcttagtttggtacatcccacctaaaacagactacctactaattcttttaaatctctctgttaggctctttattgtatacatttgtaattatatacaaaattattttcatactcagctagttatctcaataccacacagtgattaatttatgtgtcagtgagaaacattaagaattttattgccaagagagactcacataaatcagaattcttatcaggtttcaagagagataggtgcagtagggggtggtctggaatatccctcttgctccccaggccctttctttcggcatccgatgagccctggcccagggtattgratgaggtttggagggttgggtgtgtaccagtgacctcatttgtacaggaggagccatctcaatatgaagcatctccattttatactcagtgatacagcatagatggacatttttcagggaaccatagcctatatatttttagattccatcttcatttttcataagcaattcagacatattctgccaaaagcagtatatagataaactgccctagtgaaaacccttcagtttgtttgctaggaagtctgtcattagtatgtttccaaagagatcctaccaggtcatctgctttcttactttcaggaaagcagacaccattttcccctgtaagagggaaaatggatcacaggctagctgcttaactcaggcagcaagtggaaactttgaatgctctcctcaaamtatctgttctattcttgcaatccccctcacttgtatttttacccattggtgttcatttcctttgatcttagggaaatacttgttttctcatttcttctaagcaaaaattctaccacttgtccccattttaactgctcatctactttagaacggtactccatcagtatgtttcttctgctgtcttgagtttctttcccatctcttcattgctgtcagtttaaaacactgccaagttttccatctttgaagaaacaaataaaaaataatatttttctgtatcctacttgctcctaaagttctccatcctatccctctttttccctacaaggcaaacagtcgtgacacttgccatactcattttctcactgcctatgaattcctcgatttcatgtactttagccattataatacaggttctcaacatcagcattattgagattttgtcctggataattccgtgttagggggactgtgttgtgcattgcaggatgttaaatagcattcattacccctacctaataaatgccagtgggaccccctggttgtgacaactaaaaatatttccagacattgccatgtgtgccctggtagataaaaattgcccccagttgagaactatctaaaggtatcagtgactttgccaattttcttttttttaatcttaattttgtattcatttaacagtgttgaggactctgcgcacttactctctttctttcacagtgcgaaatctcctgtggttattctcattcttctttgctcttttcagattcctttggaggcttcttcacacccacactttaaacacagctatttctgccatttgatcctttattgcttttttatttacctgtcctatctaaaaacttaagatagaggggaagttataagtggattccaaacacaaaggctgggaatttctattatattggaaatctgacaaaattgaataggcacgacaatcacaatatattagatttatagaaatataatgagggcctatgaaaaattatttccatagggagaatagccaaaactctgaaggcaattatctttggagtggatatagagaaatatgcagtgattttgccctaatagttaatggattctctccttttttttttgatgtatattgctattgtaatttttgtttttatacaactatatttcagcctgcttttaaaatagtcaagtaattcttaatatccccttctgtgtctaaagtcactttggagaagcagcaattctgtcatttaaagtaggacctccctattagaatcagaaatgtaatacattgtaatactattttctactctcactgctatcactgaccattatgcattatttttccaaattgaaagcagcttaagtcaagcaaaaggcagtggcaaaagttgcgggcattgtgcaagcagcatgtattaaacaatccaggaaacttggcaacccccagagacacagaygttgcccacttctgccctgcagtgtggcctctgctactgytgtctctgctttgtctccttcagagcttcccagggactgtgcctcaggctgaattgtgcctcaggctggctctggtccaagaggagcttgtggtgtgcagagggcatgtgttggggaggggtgggaagttttgactatgactttagaaaaaacgaaaatctataaaatacctttagtgtctaaaaataaaaaaagtaataaagtaataaaatgtactaaattagtgaacacaaacacttttgtaatattttcatgcttttccacacttctttgttttttaaaggcttttggtacctcctaatctttcatatgctgtaagaatatgcacttgtattttatctttatgaaacttgtctgaaataaaagtgcattgtttaaaaatcaaaggtacactttcttctaaaacacaatatgaacaaagtaggaaaacttacaaaattggaatacttttttgtcagttagatgtgattttattttaatcaagtacatggtatgatgaaaagaatgattgatttgggaaaggacactgaactccaatgttacctgtttcagaagataataataatactgcccacctcatacagttgtcatagaatcaaataatatagtttatgtgaaaaggctttgtaagatttaaagtgctatacaagtgaatatgacagttgttttatcaataacgtgtcaaaactagaaacattgaaaaacaaatagtattgccttttaaagtagtgatttagaaaagaaatattttaaaagtcaaactcacatttagggtatatctttaccatgacagtgttagttcctttcagccrcaactaaaaattcctaaatgttcaagttatttatctattagatctttataagggtaatgtgctatttacttgatttgyatttggctattttttgaaaagtcatacatttttcacagtcttcaaaatcgatttataatcacttagaaaaaaattaattgagcagtatgcttaagatttgaatgctatgatttatgttatactttagttagaaagtttactcaactcagttattttctgattattaaactgggaaaaaagcatctgctcagaagacaggtgtcttggctatttacagagaaatttaatttgcatttttttatttcttaaataaatacaagtttaaccattgtagacatttatgtgactacttatgtaacttatataataactcgataaattactaattttaaagtatcttttgtcaaattttaaggtaatgctattcaaaataggcaataacttcaaagaccaaaaaataacatagaagaaaataatgatagattatttattttcctttaagaataaattttgaacgtagtatatttagtagtaatggtcatttctatgataatttaagatctctaatcttttgtgagagaaacttttgtaacacactcgagtttttgcacttgtctttcttctttctttattctattggaaggatacttccaccagtaggttattcagcttgaatatttaaactatcagggattagaactagagggtaaccagctgtcagataattcatatcatgtattaggcttcagttgggatgagacagtatatctcagcatgctgttaccttcagtaagatttatgttccaaagtgtggatacattaatacaaatagtgattttaaatgaaaagcagatcagccacctagctatggttcatgaatcacagtgattctcactttatctttctctcttttattttttaataataataataaaagtasrtagaaagtatctctgagccaagtgggtgccagagtacattgatgctaaagctttaacttgacccagccgtccactggaagttgctatagctgagaaaaaaagaagtgaggcatagatgctgggtttacatttagaaaaagagaaaggaactattaatgcgtgcttttctctaatagcatttatctctctaggaagtcctgcataacaaaagaagttgggatgccattaagttttatgaagtgatactatgatttcttgaagggaacttactrttacgctgctggaagcctgtaaggtctgttaactaaagaagttcaaagatagccacagttgttcagtatatagttttgctttgtatttttttgattcagtgcagtggggttgaacataaaagatgcttgaatcttcagcttttcatgattctctgcttgttataaatagactattaagtaatttttaggaaatcagaacaagcgacctattcaaatgatttctacagaatttttttttccttttgtaaaacaatataaaatacagtgatttataaattttggtactatagctttgctaaaaatttctatattatttaaaaaataagaatacttttaccataagataggaaattattctggttcaataagcaagcctattttactgaaacaatagataaaaacttcactaaaaatatttttttctttttttttctttttttaagaagcatgagtgcataataaagtaacagtagaaatgctcaggataaaacagcaacccaaattaaagagagtgttaaaaagaygattttattagatggacttaatgtccacctaatggacaaataaagtaaattctgtttgacccagtgctaactatgtgcccgttatgcattaggtactattttagggcatggggatgacatagtcaacaggaagagaagatttctttacttgtggcagctgagttacatggtattaaaagaaactaaaagaaagtcttgaatctgaaacatttagatttcctaccagagtcctgaaatgcctgcattctgaaaatagaggctcctttcccacaaggacaccttactagaataagtaagaaattactagttctggattctattacagatctaagtaatcaatcaaatggtgaacagcccacaaccaaatctgaaaatagaagtgaggggatataattggcttataattattggtgaggtagagcaaaggtttaagtaaagtgagtccaatgcatttcttcagtgaacgttgtggactaccatgagccagaaactgggcattatgtcttccaagaaatgtaagacagcttttttttttttttaaactttgaaaggttgtattatacatttgttcagataatctgtttccacgaattgtcagattcacaaaacagaacttgtaggaagtagaactcagagaagtaaaatgaggtatcttcatctctatttttattttttcccctctgtcccctttttctgcctcttcttagtgtcaacttatttcttaaaaataaaagcattactgaaaataacaaaactcagttgcatattaatagtatcagactcaagagaacagataaattaggtattgcttcttctactgttcccgcatgtgaatcttttactttaaagaaaaagttaaccaaacttactttcatgctttatagaacgagcatcactttagttatgccaygtcgctacagttttcataagtaaattttattttatttttttgagatggagttttttttttttgctcttattgcccaggctggagtgcagtggcttgattttggctcactgcaacctccgcctactgggttcaagcaattctcctgcctcagcctcccacgtagctgggattacaagcgtgcgccaccaccctgggctaactttgtatttttagtagagacggggtttcactatgttggtcaggctggtctcaaactcctgaactcaggtgatccacctgccttggccctccaaagtgctgtatttacaggcatgagccaccatacccggctatttttatttaacaataatttcatagttacaaggaagttagatggattaagtaaagaactctcataggacctttagatagatttacaaattggtgatttttatcacattgtctttctttctctctccttctgtctctgtgataaaacaaacatatattatctatattatttttgtgaatcatgtgagtgttggttgtagacatcatgattctttactcctatatactttagcatgtattttctaagaagaaggatattctcttacatcasaaagtaagtatcaaaatctgcaaatttaaccttgccacagtattttatttaatataaatctatattcagtttttcctagttgtttcaattaaaacaaaatctaggctccaatccagaaccacgtgttatgtttagttgttatgtctcttttctctcctttaatctgaaatagtttctcatcattttttctcttacatggcactaacactcatgacagttatttgcagactaattcatgattgtctggtttttcactattagattcagcttatgcaatttttggaagagaaactacatgtgtaatatattgttcttcttagtggatcatgtcagggggtgcaaaatgtcaatttatctcattcctggtgatgttacttttgatcacttggtaaagaaagtgtttactagttcctcacctctctgtggaaagggacacagctgaagccatgccttttacatagggtgctctcttgcctacacagttgtaaccgggagtggttcaagacaagacatagactcaacagttttgatgatgaattgtggaaaagaacatagcactaaccaggaattagacaagaaacagaataacagaatttctcagaaacaaacacaaaacaaacaaaacgaaacaaaaaaagaaataaaaccaagaaaaaaatcagaagaaaaaaacaaacagaaattcagcaaacgtgaaatgctattgmcacttgaaagtcactttgagatccaagaagagacatgcctggtcttaaycagaccgtgaagttacttctccagcaatgcagtttaagtggttctagcatgtgagtttacttcagcatctcagtgagttgtccacaattgtcaaagtgtaattttcaaaagtttaaaaatgattttttacaaatatagattggacaagaatcaaagatctactcaattcattaataagaaaacctgcacaatagtaaattggttcaaagagcatttgattaactggatatttatagcaatttgatagaagaatgctagagtaatattggaaagttggatacaaaatcggttcaggtcctgcaggacaattatcaattactagacaaaaacatttgtatcatcattggatacaaatttgcaagttacyttttaacttcactgagtcagagctcttacagtaaatagcaaaatcaaacaattatataatctattgaatgtagtaatctttgggaaagccttttagrtaatacttcagtatgcgatcaccttcttggccttctttctgttttgtattcttaacacaaccattaccttggtgagctcaagagaaaccaagagaacagcaatttagaccaagagaaattcatgtataattgcgataatgcacaaagtatttcagtaaggcaggagagttagaataaaggtgagatgctatgatagaaaggggtaggagatagagaagagctaggccagggagagtcactattatataatgagggtttgggtaggaagtcaggagcgattgactttttttaagcgattggttttaagcaggaaagtagcacaaacagataggccttctggaatcatcattcatttaattttaaatatattaaatgaattcattatgtggctataggttagagtaaaaartactttacataaaaaaagacagtgttctttattattgtgactacagaacagcacattgcttttttgttgacatttgagataaactttatattgcaatttgtttgagatactttgctgccaaaaaaaaaagttttctctcagcatttagccaaagtttcatattatttattcaattatgcattgttttatgcttgttcttaaaaataatagagttgtgtatttaaaagctttcccattagtgaatagttacccaataatcatgaacttatcaattaaatctattarggagaatggcaataatgacgttcctaagagaaggacaccaatgaattatttatattttggctatttttcttttattcagtagtttgtgtaccattctaatattwtgacttcaattataaaataccacaatttattagtgactgaagtcacacagcccaatttatgataaacctattttctagtcacaaaccaaactgtcattctgtaaaatatcctcatagtcttgcacatagggtagtgtgaaaggtgacaaaaggtaacaggaagaatttataaaagtcaaaaatcttatgtgtaggcagtggatgtgactatagggatttatacttattgtattgtaagtagcagcgggtttttggtttggctcctgtgtgttaattctgaaatcaactaccttattcaaaggcattattttttctaaaagacactggacatgaagaaacaagtagccagagatgcagttggcatgagctgattgcaagattattttctaattaaaatacgtcatggcaaagaaagaataattaggtatcatataggcttcttcattgacagaaaataaaagtgccacacttaatttttaaaccattcacaaatccaattcatgcgtaaagtgaacttaaagatgacagactaattaattaatgatgagtggattagaaatgagaaatacaaacaaacatgtctgaagagaggtagtaattatatataagcttgtaggttgtcaggattttcttaagtatttattattaggagaccttaagatgtttttcctaatacctaagaatatgagctttctatgacatttcatctataattttcatgattaagccttatataacattttcccttttcttttttagccctatgaaagcaaatatttgttccctaaatttgctcattgtcagggatggaaaatttggaaagttaatatttattggaagtttattatatatcaaaacttacatagtcatatttcccccatgaaaaactgtgcacttttagtaaatggatgtagtcattaaaattctttctcctattgaatcctacctccctgtaacttgtgtattgttctctgttgcaacacacaattctgcagtgttggccaggctggactcaaactcctgattttaagtgrtcctcccgccttgtctttccaaagtgctgggattacaggcgtgagccatcacgcccgacatagatatttatagcttttttatatttttggcttttataaaatatgtatattctttcaatattaagaacactcaccatttctatgccatggatacactgttttgggaaataatctttaaaaacatgttacattcatagaaaaatagcataaatcacatgtctgaaaactgattagaaagtgataattaatcctttttttctagacactagaccttagattttctaaattttgttttattccaagagaatttggccttgactgcagaaatttccacagaatgattattttggctactgactaggttaactgacagttatgtaatcttgagttaaaggactaaagagacaatagtagatttatttattttggtggtatagatttagttaaagagttatccttaggatcactgataatgtggaggaacaatatttcagattccaaacataggaytctacatgtgtcatstaagaaagtgtaaaatgaataaaaacacttaggaccaatttgaactgacaattctgtgctttcattaatagactattgaatctcaaccagttttcacctgtcttcttcctagacttaatttgaagtgactgggtttaagtaagaatggtttaagtaagaacaggctgttaaagacttcaaaaacatttaataaatttatgatttcccttatcattatgtgagaagaactacaaatcagcttggtcctttccttgaggatatgtgtcctagatttgtgtctttgagtaaaggtattgcatagggagtttatttttgctttgattgtcaagaaagtagcaatcctggtgatgatggtggtgcgtgtatactttgctaaagtgaatccaatatgtaaaaatacacatttataaagcaagggaattcagccagtttttttgcatacaatttataayaaatatactcaatagcaaatccttctgcattcgtcagcartattagctgatgtttattaatggctgatgtttattaatctacagactggccctaagcctaaaatcaaaggtgaacacatcacaaatggtttatttacaaaacattacaaactgcaagacaaggtaatatctggcctagaaaataaggtgaagtagaaaaaacagaacttgcaatcagaatcaataaggcctgaatatctgttctctggctcttcccatgtaccagttctctaytcacttccatcaattatgtttgtaaaaggtggttgaatgaagaaagcagaattgcacagaaggataagttgaaatgtaatgcagtgggaacagggcctcaactgatcatataatgaactctcagactgagatgagtcttcatatttgctctacatcagggcaagaggaagcattctctatacctccatattgatcaaggagtgcagactgctcggagaaggggttgtgacccacagtggacaaggcagtaagggctgagagctgaggccaagtcgtgaagagggatttagttgagagcagatagtagtcaaaacacagcagctgggagaatgcatgtttcagtcctgattgtggggatctggaaagtatagcacttcagccattggagtatctgtcttcacaaaaatcccttaaagttagacattattatttttcacatactacaaatgaggaaattgagatatatagatagtaattaatactaataaatatgctaatgtagttgtttttaatctttttttttttacaagatcccttaacattcttaaaaattactgaggatcaaaaagaatgttggtttctgtgagttgtatcaattaatacttacctaattaataatgaaaacagacatctgaaaaaaagtaagctattttcagataatagtatttaacccattatatgttaaataaaataattttttagaaacatctatattttcccaaacaaaaaaaatgatgagaagtgcggtattgctttacagttttgcaaatttcttcattgtctggctgggattttctctttcttcattcaatctggtgcaatatgttgttttgtgaagaatattagcccacacatagatatgttgttcraaaagggtagttcctcacagtttagttgaaggcaggatctgaagccatattgatgaattttttatactctgaaataaaatgctgatactaatgtgaatattgtactcatagaaacacttttgactctttgttcttaaaaccagtcacattcactgctagttttgggacttgccccatctaagatagtggttgtcctcacctcccactatcttcatgcttcccacttcacttgctcctttctacctattcctgaatgtctaatgcaagttcttcaccccatgtgaaactctcctgaaatattccagcctttactgacttaaacttctgttttggacaaatgattttctgattgttttctttctgttgttttcaattttcttttccttctgctttttatcatctgcagttgtatttgtaacttgttttaaacaaaaagaattgaaaaattgaagttcctaacaatgttcattcttttgcagcttacacaggaaaaagaagcaaaacccacaatatatgtcatcttctgttgtgaaacaaagatatttcacactgattaccttatgagggcttgagtgtcactgattgttttactccagcatagtgcttaagcatagtatagtattcagttaattaatgtttattgagcttaattgaattgactgctttctagctctgcattttcgtttatacaaaaaataatgaaaatttgttattttaatcagacgtactcgccttctgattcagataaaattactrattttagtgagctgcaatagtgacaaaatctatctcctgttatgcctttgtatatgttgtattcttgactgttcagctattccacataaggtacatagctttttattgtattgacatcatatcaaagtccagatctaaaccatttcatgcaataaaataagtaagtcctatgagttccaatttgtagaygatacattcttggtagggagcttagtttctacaaggagtctcgagtaaaagcagcatttgttgaataaatgacatgttgcacatacatgtgtttctgtggatttaaaggtttgttgtagttttcataaattgtttatatatttatagcgtttacaagatgatttttgggaaaaataattttctttctatagaactccagactagtaaatccaattaccaactttccccgttactcatgccaaaaaacttgaacttcttcctgcctgtgttccttctctgagaactcacatttatgtcattcccaaattcttttgtcataagacacccagaatttgaccagttctcaccatctctgtcattgccatatgtcggggtggcctctctggctggagtcttgccatcgcctcccagctgctcccctacttttggttcactcttgcttgcttagtctgctctcctcagagctgctcaattgatccttttaatatctaaattaaattatgttatgtctgttctcaacacttcccaatggcttcccactatggcctgcatttccctacacaattccattccttgctttcgctctccagttatctcctattattttaccttcctttcgctccactaaccactttatccttcttaatttttcttgggcttgtcaagcaattacccaccccagtgtctttgcacttgtaattcttgctgcttggaacacccttcctccagattactgcatgttgtcctccctcattttctttgggtttctgctcaagtgtcaccttatcattatgtcatccctgaccattctctataaaacagcaactgctgtttttttaatctttccgtatctgctttaccatgcttccttttttctcaataatatttatcactattttamataatatatgtttgcttacttatttaatgtgaggctcacccaatactggagcaaaagatactttagagcatgtactattttatatatatatatataatgaaacatccccaaagcctagaacagggcatcaaacaaagaaagcatggaatacatattaagcaaatagaagaaagaaaaagtaaataatccagaaaaatattttctaatttgttttaaccttttgttattttatattttctccttagtgacaattaaaaattccatctactattatattttccccccaacacttccaatggttttctgccgttggaataggaccttgctaaaacaggcttttcataaagttctgaattacatattaatttctcttttggcctcacagtaggaggatgaaatactgcaagtggtagaagattatttttaccttagaatacacatcctagtgcatgttgcaaggctccaaatatatctattctaaagcgttgatttacatttaccctcaaaaactaaaagcaagcggagtttgacttctttgttctttcatagtaaatatcctgtgtaatgagagacttttgttttcttaaaaaaagtcctcagagaaagctgcactattactcaaattgtttctgtcaaattgaatttcatttgtgaatttgtgctagtttaaaacatttaaaaatcagacattttggcatattgtttttggattcaaaggaaattataattacagcagttacaaagcaaggaaaaaatagctgttgaatcatctatggagcatattgcataatttgtaattttagactctcagtaattcaattaatttaacatgacaacttttctgtgctttacaatttggcaatttctagcaatttaataggtttccccctttttatttccaaacattcccataaggtttacaagtctttgaaatgctaatttcaatcaaagtacagtttaatttaaaatttcattgttaattgtagttatttatccatttcagttatcgacgatccagcccagtggcatttgtcaaaatgagcagtcagttcatcttgggtttagatactaaactggaacatttaaaagttaacctaatgatatgtttagtaataataaagctgtaaacaaatttataatctatgcttaatacaaattgtaacataactttaaaaatactcaagacatgaataacagtaatgagttttcgctgtaaagagagctgtgatataatgtgggagaaattgaaattattataaatagaaaataattttgagaactgctactgtcatagaattaataattttgcactgtttttgaaaatcactccatttagaagatcagctggaatgtctgtttcctcatagataaatttttaacagaatagcatctttactgctgcatcatgcagtgaaatcagtgaaagtgttatttgttgaagtgcttagctctgtgatcttatgagagttttattatcttcttcctagatgaaaaatatctcttcttgtaatcatctttgacattaacttgacaatgtttagatggcatgtaaatcagattatgatgcctaaccattattaacacagcaaatgaatttttactctcgagttcataaatccacaaggagcattttttaaatataatatccttttaataaacctagatatttaaaaattaatttttacattatccccaaatactccaaatattatactttttgttatatttgtttttactagtctagacaactcaaataaaatagctaatcttctatgatatttatttaccaattctatttatatttatactgcattgtgttttatgatctatggataaaagctttaacttgtcaacctgactattaggctgtttagacattaaattcagtttctttttctctaggctgaatctgatttattattgcaccaaatacagttaataaatactcttttatggaaattatttattctgacctgaatctgccttaatcatggagattaaatgagactgacaaaaaatagaaagaaccttaaggtgtctggttacatattttgttgtagaatgtttaccttatatgcatagatagactaataaaacctcaatgtaaatataagctttagaatgcaggggtttatttggtggattagatggcactgatctagtcttttcatgactacctccccttgaggtaccgaaaatctggattatctttacttccagaagaaattaccagagacccactggcaaagtatttaataagacaattattttcttttaagtgcagtaaatgcaggcagtgtgtaaaatctgaattgaatacaagagatttgaaagcgagggatatacaaagagagaacatgcttattttctggtttctttagtccaagaaagataatgttgaactgagaatgggtgagaacaaggtaactgacctggggatctcacagttttgtggaaacagtgatttgctaccaatgcatatatgaggcctttacacttgttctattcttattaccatttgggcaatttcacgtctcttgtcatcttgctctccatagctcactgttaagtcttcagacattgactatcctcacccttacgccatcctcctttctcagaaagtaatcatgcctacctttcttttcacagagaaaatggagacaatgagagttctactcactcaatttctggcaatacttcccacatatacatttctatacttttgcattcagcattatttttttcattccagtcataaaggaaaggtcatttatcaagaatcttgtttgcaagtgaaagaaccatagcaccgagtatccctctgtcacctgctcattttcccgtaatagttaatcactctgaaataatattcttattttctcttactttctcaccatgaagttttccrtactccaggactttgtggaaactgatcttgttaaggatgtccatagtttcctcattgttaccatcggtggacttcatcctctttctcttctctgtcatgttatattgctgattattcctttattcttaaaacatcctttttggcttttagatcatagtattttttaagattttttcttatcttattgctcttttcttatcagttgccttctctagtatcttttccttaggtattgatgtcctccagatattgattctgggtgcctctcttcttcttcactgcattttcccccaaatgatttaattaacttcaattctcaattgatgataataaaagtctctttcttcaggtcagcctctttatctgtatgacttgcaggcatgtcatctttaatatgttcaaaataaactatccttgctatcttgcaaactttctcttctattttttgggggcctttatcaacttgcttatcaaagtcatttatcatatccttttaattataaagtcttatttatacagcttcttaattaaaacttcagtctgccttccttccattctcactgtcattacctaaattcagggcccattatttatcacctaggtgattgcagtagccttaaaactagactctaggccgggcatggtggaggccaaggtggatggatcatttgaggtcaggggttccagaccagcctggccgacacggtgaaaccccgtctctactgaaaatacaaaaattagctgggtggtagtggagcgcgtttgtaatccagctcctcaggaggctgaggcaggagaatcacttgagcctgggagacggaggttgcagtgagctgagattgcaccaccacaccccagcctggcgacagagtgagaccctgtcccaaaaaacaaaacraaacaaaacaaaactagactatattttttagacttgatggactttggtgtattctcacaccagactttttggtaacacaaagtgtttcatgttacttttctgcaatttattttatttttcttaatttttgtgggtacatagtggtatatatatgtatgaggtacatgcgacrttttcatacaggcatgcaatgtgtaagaatcacatcatggaaaatggggtagccatgccctcaaggatttatcctttgtgttacaaaccatccaattatactcttttagttgtttaaaagtgtagaattaaattattgactataataactctgttgcgctatcaaatactaggtcttattcattcttactaactattttttgtacccattaaccatcctgactcccctccccaagtccactaacctccccagcctctggtaaccatccttttactttctatctccatgagttcaattgtttcaacttttagatcccataaataagtgagaacatatgatgtttgtctttctgtgcctggcttatttcacttaacataatgacctccagttccatccatgttgttccagatgaaaggatgccactcttttttacagtcgaatagtacttcattgtgtatgtgtaccacattcatttatttttctgcctaaatattcttgacatacaaataatttttccatttagtatcatatttcaagatttaacttagtcttctccyaaagtgctgtgttctgcacgtgttcttattatacttcttatcacacttacttgaatctgtttgtgtaactttttttttgactggtttctcagtacatcataaatgtagagactgtgtggtacagatacttctcgccttacaatggggttacataccaataaacccaatagatattaaaaatattgtgaaatcggaaatgcatttagtacccccataaactccttgtaaagwtgaaaatttataagttgagccatcaaagatccagatgctccttgacttatgatggggttacatcctgttaaattcatgataaggtcaaaaaattgttaagttgaactattattaagttggggagcatctgtacttatccatctgccctcatgccaggtatagtaacttgtgcttaataaaactttaatacacctctgaatgaatgtatgtgtgaattgtctaatagatgtaactaagaataaaatgaggataacttcaaaagagaacatatgtatattaaatatgctatttttacagaatttattcaatgagactactttctcgttgtgtataaaatattgaatgcatataaattcaatttcctcgtaacattcatttgaccaacttcagccagacagtccttgattcccatgtttgacagtttgctcatctgcttagaaaaagggaaaggaagaaaaaaagaaaaccatgctctttccattaaaagagttggcactatcaactgttttattgtcaaaactaaatataattttaccaatgatgatgacatttaagaatacacgtttgtgtgtaagctggcctttaatacaaacatttaacagaaatatgtgtaggaatgtagtaggagaaccaccagcattgaagtcattgattgccatgttactgacaaagtatttaaatggaagaaacaagagattgagttgtctcccaaacagtaagggtactatgtgtgtttttgcaggtttattattttggaattgaaaaattttaagaaaaagttatcatttgggatgacaaatgctaagtgaagaatcctgtagcagaagtttattgttggttactgctgctaattcttcccagtgtggtactttataaaacaaattttaaattctacttggttattctcaggaccaaaaggtgataattttttgtgtgtgtctgcttgaaaatatgcagtatgaaaactcttaaatcaatagtttgtagtacagagaaataattactgcttggaaaagagtaattttcaatcatatactaaatgaacagacaaattaacaaaaacgtttattgaacttatgctaaaggcactgagcacaaccatgaacaacacacatggcccttactctcttcgaacccagcagcataatttatctcttagattaattcaatagcctcctataagatctccacatctctctatcttctaaaccatattttagagtaattattgtaaaacagaaatcttatgtaatctcactgtttaaatcatttcagaaatcatttcagaaattaaccattactcttagaattaagagaaaaagwattttattttttctctataggctgtgatggttttggctctacctgtcttcatagtctcctttaataccctcccccatttatttctgtggtctaaccactctttccttccttaatttatgtaaataccctactttttttctgccatatgacctgtgcacattctgctttttctatataaaatggtgtttaaatattttaatgaagttaaaacacattttacccaaataatggatgccgcttggactaatggttatagaagctgttacataaagaatcctttgtaaatttatagaaatgtcatagcttaaccaaatatttcttgcataaatataaataggcaaaatgtgatcaaaacaatatttaaaattatacatttaatacagatttcttattattcagttaagtggtatatttcttaagcacttataaccgtgtagatctctcttctttattgcagtaaaattatggtaatttatatttattttgttttgtggcactttatataattatgtgatatttcaattatagctagattgtcagtgaaagcttagattatactcaatataattctacttaagtataagatttaatttgaatactaaacctgaaagcttcttaacttcgaatgctttccattatcaagtaatgcttgatttttaatttgtctagatttatgaagagctttagagtacttgatgaaattttatttgaaagcatcaatatggtcacaattttctattactgaaaaaatgtgtgcctgtgtatgtctgtgtttgtggcatgccacataaataatgtattacaatacttgtatgtacataagtactggttgctttggaaaatatattgctcttctatctagtttgacttgacaatgaaattacaaagaattgttgcagttttaaatttattatttttaatttcatcttattaataaaaataataatgtaaatggtcacagaatttctttccccagtaaccttttattgaggctacagtagacaayatatttactttcagtggaagaaatagtaaacttcccatgaattaaagtagatcagattttatagaaatgtttctatgccctatgcaggtgaattcaatatggatagctctgatctttccgaaggctctttgtttgaaggttaaagaaataaggttattttgtttgtatgtttataacttaattttatattcctgtagtttttctatatgattaagtacattatagaagcactacagagtataattggaataaacaaaagcataaataataggacagatttgcctataatttttacttgtttatcaggctgccaatttataaggaactaatttcacctcataagactaaatactatgtattttttaaacattcagtgataactattaacataagctctatctatctatctatctatctatctatctatctatctatatactttattggtagaatagaatgagctttttagtttacctaatagggactatctcttggattacagtggctatctctggtttcacttttggcaggtggagctatccacagtcatccacagtccaaaaatatgaaatggaaaattccagaaataaacaattcatgctttaaatttcaggctgctcttgtatctcaccctgaccttcccagaacgtgaatcatctctttgtccagcatgtgcatgctgaatatgtcccctacattttactctttttagtagctgtcatgatttatcagaggcccaagctgaggtcccatcagaggcccagttgaggccacagcagcaacctcaccagagaaactggcagagtaactgatagaagagggaaagaaagaagggaaagatacggaaaaataagtagaagaaaactagaaaatagaagaaaatgttcagttgaagtaaaaggcaaatgtatcaaacactttaagcaccaaaggaatgtgagaagcaaggtttaggtggaaaaacataggtccactggctctgatatcccagtaaacaccatggaatattatgcagccataaaaaagaacaagatcatgttctttgcagggacatagatggagctggaggacattatctttagcaagctaatgaaggaacagaaaaccaaatactgcatgttctcacttataaatgggagctaaatgatgaggacatatggacacatggaggggaacaacacacactggggccttttggaggctggagggtgggaggagggagaagatcaggaaaaataacaaatgggtactaggtgaaatacctgggtgacgaagtaatttgtacaacaaacccccatggtgcacgtttacctatgtaaccaacctgaacttgtacacctgaacttaaaataaaagttaaaaaaaaggtatcaatgttattctaaaatgaaagtttttctactctcataaaatatttcagtatttttgttatgtgtacgtatttgaaatcatagattatataatattattttactatgttcttttatccatttcataaaaccatattattcaattattcacaygtatcttggacattaacattcttatctcaatagggcaaatttttaattttccccaaactgtttttcagggcatgctatattccagctacattgtattgcacatagtactgtctctatctgtttttaattatcagtggacttttcatctcaataaaaattactcagtatattaagacaattgttcatttgattattttaattattctgttaatgtacactgattaaatgaaaggagtttataattccaaagatagaattatattttcagattaaaaaaaagaaaaaacgtagtgaatttagggtttagcattatctgaggtttctgacatccactggtggtcttttttcccacaaactattatgtgtatcactgccagaataattgccctaagcaacggtcttaaacgttgttgtgaaccacattttaactatctggaatgtggctttgtccatatttttatatatcttttttctattaatctctgagtttatagaaggtagaaagcattttttatttatctctgtggctagcactgtatctgatgtttcctaaatataagtttatggctttgaaagaatgagttccagtgtgcataaaaatcctaatggggtccctcctaacataaaatggaggccaaactgtaagggattctgttttatttgcctaagagacaaaaagtcagtctatattagggaatttgggaaggtgaaatttgaagtaaacaagtatattgactttctagttttaggttatcacttatttagtaggcatgaaattattttttaaatcatatcctgaacttgtatttattcaacagatatatttacaaataactcaggtaaatacgtggcaaaataattttgaaacctagcccttgcattttagatttctaattatataattttagcagtsaaaagatcttaggaataataaaataaagtaattgtataaaggcattggtgagcacttgtttaggatataggatagaaacgtggtggcatacaattctagaatttacttttctatcttgtctcctggttgtgagctctaattttagtgaaacaaattcatttctcagaatggcatgttcttatttttttgtattccattcaccttgtatatactgtttcttcctctgtaatcttccatcctttaaaattctttacccttgtttgtcacgtatttcattttcttcttttcataccattactctctgctttcctaaaagactccttatctcttagtatacattgtgtgaacctctaacagtgcttaactctattaattataacaataattagagttacaacagtaactaattttcattcttgtgctcagagctgttcaagcactgtcacgtataaccacaggaaacctctgtgagtaacactcttcattcacgtgaggtaaatgaggcatagtgagtttaagtaaagtgttcacagttccacagatggaaagacttagaaaccctaaactgtcataacccaaagtgcataatcataaacactactccatgttgtaaaagaagataaacagttctgcatctttcattgtacttttagccctggaaatacaggaatgatgccatttcaaaaatgtttaaaacaaaagtatcagattcagggcctggcacataatagatgaacaatcattattgaattaataagtcatgaacaagtaagtaaatgtatcaaaaatacatgctagagggatgactatagggtgattctgcaaggtagagggactgaagaaactcttatagagaagacgaatatgaactgagcattcaaatatgtatgtggaaaaaagagggtgcaggtaaacccagcagattatttgcgagtgttataagagaatcatgggaaaatttttggaatcctggcaatgctcagggaaaaatccagttttcccattactatgaggaataaggcaagtatattcttgattatgagtattatttagtgttgttttgaaggtatatgctaaagtaattggacaagatgaagaaataaaaattggaaaggaagaggtaagattgttattatttgctaagcatgtaattgtttacatagaaaactaaggagagtaatttgaaaaacaacaaggccaaaataaaaaccaacaatttaattaatatggcactatataatactaatctacagacataaattaattggctttttatattcaaacaaaaagtatttggaatatgtaacggaagtaaagctaccatttataatggcaccaaatataacaaatatagctgtctataaaacgggaaagatgatttcaaagagaaattttaaaagatcttgaagtacacaaaaggaatcttgaagaaaagcatagtcaaccatattctctgataaaagaatctgtttcataaagataataaattcccccagttaatctaaaaatgtattttactgcaataaaatatcaatggtttttaaaaagaattatacaaatctaaaaatttagttaatctaaaaatgtattgcactgcaataaaatatcagtggtttttttgaaagaattatgacaaatgacttatagtactaataagaaaatgaacaaataagataatccagggcatgttcgaaagggaaaaataacaagagggcactagccctatcagatattaaaatatataaagctgctgtaattaagaagggatgctgttttaacaggtattaaaatatattgtaaatctacaggtactagtgcacatacagtcaatcagattgatggaacatttttaaaaagcaataaatccaaatacagagagaaattcaataggatagtaagggtgacatttctaatcagcgggcaaagataccttgtccagtaaatggtttagggtatcttggtgttcacttggagaaaaagttgtgtctccccttttcatgttttataccaaaaggaattccagagagaagtcaaaatatgaagccatgagaagctgtaacaaagcatgcaagatttctatggagaaatctcaagttggaaaagatatttctaatgataccatacacttgaagaaatgaagtaaataataatttgagtatatataaatggaacagaattccacttataataacaaaaatttttttagaaaatagtgaataagctgaaaacagtgtgtatgttcaacaatcgtgtaaaaaaaagtacattgtgtgtatgtatttctagaagaaaacaaaataaatatgtagcaatgattgactctggaaaaatagattatttatggactgggtagtaatgaaacacacacacattcttctgcagattttgtctacattttatctttgcataaaattttttgttttttgtctacttttttgtctacattttatctttgcataagaaattatgaataaaactacttagtcataataaatagaaatgttgacaatgagtgtgttgatggcagatctgtggatggatgacttccatttatactttttttgtgtgtgtttttaaatagaaaaactctataattgtttccaaatatctttatatcctcaactttataatttatgagcagtgtatcatatttctaaatctatgttctcattaaaaaatacggagattaggccgggcgcagcggytcacgcctgtaatcccagcactttgggaggccgagccgagcggatcacaaggtcaggagatcgaaaccatcctggctaacacggtgaaaccccgtctgtactaaaaatacaaaaaattagccgggcgtggtggcgggcgcctgttgtcccagctactcgggaggctgaggcaggagaatggcgggaacccgggaggccgagcttgcaatgagctgagattgcgccactgcactccagcctgggcgacagaccgagactctgtctcaaaaaaatcaaaaaccaaaaaaacaaaacaaaacaaawaaacaaaaaatacagagattggccaggcgcggtgactgacacctgtaatactagcactatgggcagtccaggtgggcggatcacctgaggtcaggagttccagaccagcctggccaacatgatgaaacccgtccctactaaaatacaaaaattagctgggtgaggtggcaggtgcctgtaatcccagctacttgggaggttgaggcaggagaatcacttgaacccaggaggcaaagggtgcagtgagccgagatcgtgccattgcactacagcctgggcgacagagcaagactgtctcaaaaaacaaaaaaaaaacatatatgtatatatacacacacacacacacgcagatagtaacaggtagcatgatttagtaaacataacattgaataactgtttttcctgtaaaatgggggaataatatataccttgaggactaaggaaaacaatgttgttaaggcacttagtaaagtatactatttttgaatgtctatgtgtttctttagataatatttaatttgtttagcttactgctccccagagccatttttgatgtttaactgataccacctgtgattgtttacccagtattgatagcctgcaatatgcagagctattttagkaactgaggaaatattagcaatcatcaggcattctaataagtgatacaagtggaagatgttatgaaaaaacagaagaggaacatcacgaatgtaggagtcaggagatacttctcttcccacttccttccctgaggtgtggacatctgaggctatatcttaaatctcgagtataacttaaagaaaataattatttatactgggcatttgttgggatgggcattgagatgtatctggaaagaacctgggatttgaagtagcatacatatagctagagtgaagaatgtatgcagaaacatggtgagaattgaggattaaaaattatgggaccacagagaacactatttcatgctaaagacattgattctcagccttgaatgactttttaaaaactactttgtcagattgaacattaaatagtcactcaagaagttttcagtttggacaagatgtcatggacctgtttttctctgcttctttctgctaagtacagctataaactctgaaaatgatggaagaggcaaataaaggaaaattcttaaagatggtaagaggaatgaaaattggtttgagatcacagaatacaaataagagcacagaagaatggcatctcacatcctctcacccaacaaaaggttgtgatccaggccttaattttcctgactccaagctagcaacagaaaacaaggtaggcttatgtctcctttggaacaataggagtctttctgaaaacacaagacaatatccactgcaggaaagcactctcctcctctgtaggatctgatgcttccttctacaatgaatagatatgaggcagctaggtggtactggccggaggaaccccaccagaacaagtggcctcatgctggaagccattatggaaagagtatgacattcctcaaaacattaaaaatagatctgtcatatgatccagtaatccctacttctgactgtatatctgaaggaaacaaaattggcttcctttgagagatctcaaagagatatctgcacgccgtgttcattgcagcattcttcacaatagctaatatatggaaacattctatatgtgcaccaatggataaacagataaagaatatgtggyatatattaatgtaatgaaatactatttagtaataaaaaagaaggaattctgccatttgcaatcaattgagtgaaacttgagaacattatactaactgaaataagccagacagaaagacagctactatatgatctcacttatttgtggaatataaaaaagttggagtattaacagctgagagtaaacagtgtttaccagcagattagggggctagggaaatgaggagatattgatcaaagggtataaacgttctaagatgaatataaatatttggcattatgtatataaaataacatgagatgaatatgttccagggatttaatgtacagcatggtgacagtagttaataatactgtaatgtatagtttaaatttcctaagaaagtatgtcttaagtgttctcaacacacgcacacaaacrcacacacgcacaatagtaactgtgtgatcaacttgattatggtactcatttcacagtgtgtatgtatatcaaatcatcatattgtacaccttaaattaatacaattactayttttcaattataccccaatacatctgaaataaaaagaaaaataactaaataaaggtattaatgacttccatttgatggttctcgtgctaggtattttttacagacttttatcattttaagtactacaagaaccaactagcatgtggccttagaaatgttcaaatagaatttagataacttctgatttttttttcctagtggaacgattctatctctattagaagttttgccatattgcaaatgcgggcttttctcagtttctttattctccttcccagtgctctttgtggtggtggtggttgtgttttgtaactagaaataaatttctatcttaatacaaagctttctttaatccctcagtgccatattactctccttgtttctaccatttgattcttctagtctatctcattaactctactaaaaaagagtatttgagcctcaaatagtttatttcctaagaacaaacagttaagtaatatgcagactgaagacttctggataagactcaaatctttacctaatatattaagctgtatttataaaaaggaaattactctttaaaaacaatacacatgctataaattgtttctttggaataatggcacacattcttcctatttatcaaatagatacatttcccagaaggaagtgggtaatgatatattatagtaaaagaaagaaagaaaagaagagaaaagaragaaaaagaaagaaagaaacagtatttaattttatcagcattcctattacacagctggcatagatwtttaacttactttgtgttaggtctcctgctttatgcaatttataatcttattttatttactttttgtaatcctataaaggctgttaaaatctgtctgtaagcattatgtatataaaataaaatgagttaccatacctattttcatatcagaaaatccatgtttggtggaagtcaaataacttgttgaggttcccacatactcctgctacatagggaagctgagataggatgctctgtgttaagattctaaagactgacttcttcctctgtgccatagacagtagagaatatgaacaggtctattactcttcttaatctgtaattatatattttacaacattattgacagaaaaatcaccttgcttcttggcatttgttcagatgctgatttaatgccacttatgatggaatatacagacttctgcacttgctraacaaattgraaagtaaaggtttccaaggactttatggctgccaaagggatattgtaaattattgtaaatataaattatccccttgccagactacagagattacttttatgttagaaataggcaaatgtgaattggcttatttggtgggcattagtgaaaagtccattgtcttaattggccaactacaaatcattatatttagaaatttttagctgtatcatttgattcacttgacatcgtgtatctttataaaagtatgtaattaacaagaactcttctgtaattatcctgacaaatttcctggtttcttttaataaaattaatagtttgcccaacttacagtatatcaaacacactatatatatctattctgtgtttagacattgtaatgtctgtgtagctatactgttttataacgtctaatattttaagtcttataacatttcttccatcccacagctttccttttaaaaactaatttttcattggttatgaattggatgaactaattatcttaatgtgattgcaatatatgtagttattttaaatcataaatattgaaatgattgtatttataacatttcttgaaatagacaactatatgtattttatgtaaaaaattaaactctatagtttacagtgtcttgaataacaactagtgtttgggaatgagactatgttaaacatttattagctatttgacattggaatatcaggttaaaatgtgtaagcctcattttctttatctacaaaatcaggataataatccctacctcatagatatgaagtgagaattaagtgaggtaataaatttaaaatcttatagggagacaataaactttagctacgatctttatttttgttgcattttaatattattaaatcgtttatgtatccaatactgataccatataaattcatgcattaatcttgtaacctttttatttttaaatattttctgggactattttagacggcaatttagatagtatctaatctgctagaaaatatcaatgaagctgtctgatatttacaccataacttactaagattctctgtattacagattctgaaaactcaggggatttaagagggaaataaagtgagcttgttgaaataaatgtatacataaatagacctgcagaaaacattcctatcaatcaaatgtatttggaatatttaagtatattataaaactactttttgcgggtctggtaaaaatggtggtgcctgcctcttttaactcaatagaaaaagaaataattggagatgaatttaatgttctttggcctttttatcatgcaacccttatttaattatagaatttcagtgttatattacataactgtgcaaaatattacttaataatcacttctgagatggttttaaaaaaccatattatgcatgtttatcatagttccccatagcaggtataggccacttatcaaaggaacttgcatttagtaattctgtgcagttagtcttattgaggtccacttgatggcagtattgcacttggtaaggtcagtctttttgcgtgatttttttatacttgatttcccgtgtaatggtggaagtaaacttttcaattaaaccatgaattatgagagacttattttctgctaatacctcagaggttatgattcagaaatgttttgtggaggaaccaaatggaacatagtaaaattgttacacgtcagaggagagatactcttgggaaatgagaaaatcaggattttccaatttttaaaattcatgactctgaaggattttagctttcatcatttttaatagaattttcacttataggaaaaggtaaccaggaattgtattaaaaaaggaatgtgcattcattagttaagaggtcaagtaacaaacttaaaatttgacaaatcatggtgtgtaccacaaaaataattgacctcaaacatcaggataaatgtttctgcttctatccaattgaaatgatttagaaggtcaattctaaaactatcgtgtcagcttctttgctagcaagaagcagtaaaagggcatttcctgcttctcagtttttaaagctttactgaaagcaaatctcacaaatgatattcaaaatattatagtcagaaagaaaaaatagttactcctgtccttattgttaaaaggccttatcccccaaattaaatcaatcttccataaagtccctaaaaaaaatatgaagtccttgggaactcacttggttttaaaacctaattaataaaactttagtgagataacttttagtttttatctgaagtgtaactataaggaaaatgatattataaaatgatattttgacaaaagatgttttwaaaataggagtaaataatacatcaaatattcacttcaatatggtgatttttttgtttatctatttaaacttttgtctagtacacatttatattacctctacttgagtgttaatgattcagatttaaaatgaagttacacattccatgtagtcaaagtgcttctgtctctagtctagtcagctaactccactgacttttacatcctccaccaccaactagctctgtatgactttggtcagattacttaatcacattttcctcacttcaaacctgatagtagtattgatattaattagtacatggaaagtacttagaaacagcagcgagtacaaaataattctcagtaaatgtcagttattttctttatccagcacttgatgataatttgtggacttatatatttaaaagcatatcttaaatacattttattaggagaaaagattaaattgatattttatgtggtcttgccaaatttgttgtatttataatacaaaatatgagttatattattaaatatggtatatttgatgttttgtgaagattacatttgggggagaaacaaatattaaacctttgtaacaaaatragcttagtaaaatgtcagtataatttgagttaataaattgcaaacaggcatcagggaattgtcatttttgactctattggttgggatgccagttatgaatgcttaatcacaaacatcaacaaatattcattcattactttataaggcacttaagtcattgtagagcatgccaggaattataaatgatcatttcatccataagttactcagaatatagttggagatatattgactaaaattcatgaaaagatacttttaaaaatgtgatgacagtaatctggtgtcacatggtatcatgtatccaactgccaaatgaacatcataaggcacgatgtgttacgaattcagagagaagatatgacaggcctaaatgttgctgaaagagattaacagaaggggtgatagtctagttgagcctgagcaataagttttgaataggaacaacagaaagaaaagaccatccagagagactattgttagtccacagtactcaaaaaggggagtaatgttaatatagcaatttaaataaaaatagtatatgagaatgctttcaaaattgtaagctaatataaaaatgagttataactgtgtacttttggaaaccatttttaaattcagtagagtatacctctttcatttatttatttgccaaaactagtagtttacatactgagcatataacctctrgagcatggcttttagagtacataaaatcagtcctctgggcagggygcggtgcctcatgcctgtaatcccagcagtttgggaggctgaggtgggtggatcatgaggtcaggagttcaagaccagcctggcaaggatggtgaagccccatctctactgaaaatacaaaaattagccgggcgtgatggtgggcacctgtaatcccagctacttgggaggctaaggcagagaattgcttaaaaccaggaggtggaggttgcagtgagccgasatgtcaccactgcactccagcctgggcaacagagcaagactccatctcaaaaaaaataaaaataaataaaataaataaatcagtcttatctatggttttatggtagataacttgtaaaaactttatatatagatatgtgtatatatatgtgtatatatatgtgtgtatatatatgtgtatatatatgtgtgtatatatatgtgtgtgtgtatatatatatatatatgtatataattttttttttttttgagacggagtctcacactgttgccctggctggtgtgtgggagcaagatctcggcttgctacaacctctgcctcccaggttaaagcgattccctgcctcagcctctcgagcagcaagggttacaggtgcccgccatcacgcctggctaattttttgtatttttagtagagacaggttttcactatgttggccaggctggtctcgaactcctgacctcgtgatccgcccgcctcagcctccgaaagtgctgggattacaggcgtgagccaccgcgcccggccacaatattcttataataaaaaaacatccacggccagacgtggtggctcacgcctgtaatctcagccctttgggaggccgaggcgggcggatcacgaggtcaggagattgataccatcctggctaacacggtgaaaccccgtgtctactaaaaataaaaaaaaaattagccgggtgtggtggtgggtgcctgtagtcccagctactcgggaggctgctcgggaggctgaggcaggagaatggggagactgctcgggaggctgaggcaggagaatggtgtgaacccgggaggcagagcttgcagtgagccgagatcacgccactgcactccgtccagcctggacgacagagcgagactccgtctcaaaaaaaaaaaaaaaaaaaaaaagcttccacatgggatgcgtccaagggagcttggaaacgtagaagcttcgtcgttcttttatggtctttgtctggtgaggtttaagagtccattctgcagaaaagagttgttcatggatgtatttctgtcaacatccattggcctagctgatcatggtcaatataatgcttcatggccaacataatgcatatgaattaccatacggttaaagatcaccatattttcaaagaaaagattgtataccttctgatataaattagacatttcaagcagtactcaactttagtttattttatagtgcacaacttttgtcatagtattttcatttactctgagaccataataaagataaataaaattgaatgatttttatgatattaatttacataatttacaatggtacatccatagttcattctgtctaggtaaaggctttaaaggacctgtaggtgacattatctaaacatactttgagtctaattttctcaaaatgaatcaaatgttgttttcctaagaaatgacaatctatattttttcattcccaatgataggcactctttaaacatatacgatggtttctatagtagtagagaaatagtttatgatagtagctaaaaagttaattattaatttacctcaggtttcagcaaatagcaggttctcaataattattagcaactattgtgagtggtacaaatcctactgctctccatgttgcttctgctccacctctccctctctatttccatttgttttacaatatctaactaaaataaawttacaacttactttcttctatttgtcctttttgactatttctctgggaattttagattatgtccaaattggacaagaaggcctatgcctcaaaattgacttagaaaacactctttttaaaaaattttaagttttattttgggttcgggggtatttgtgaaagtttgttatatgcatrtattatgtgacactgaagtttagggtrcaattgagcctatcacccaggtagtgagcacagtacccaataggtagtttttcagcccttgccctcctttgcctctcgtctagcagtccccaktgcccattgttgcagtctttatgtccacatgtacccaatgttttgctgccatttttaagtgataacatgtggtatttggtttagaatgaacaattaaccaatattatggtggagccaagggataatgggagacagttctctgtgagtctcttgtgtttctgcaagtcttgtaagcagaggcactgactatcttcaacttcaaactacctttccaggcaagtttatataggaatgtctgtttagaagatatatacagtttctttcttgagcaaaaagcaggttgttcactctccactataataatgtgtccttctagtgcaaaagtcaggcaggcttactttmtacgttaaaagattctgagtctcaagctcaggattcttctcttgtgttaccttaatgaaaattagggctcagagaacccaagcaaatactgacactctggttattattgttgccatgagtagtaaagttctttgactctcacacagggatcttgtgtcttatgtcaacatgcatgaaattatttcatgaaatttaaattttggacgataatactgtcatgcatggtaaaatctcacaacctttacagttcttgatagggtgtagggcaatagagaaagttttggtgaaaaacaattcagaatgccaaaatgacatgctgaaggtatttaatataaacttatacagttaaaattacatccagaatttaagaaaacatttagtgtttttcatatatcaccacaaatgtaaaaatgatgctagtcaaatggtttagaagcattaatcaatacataaattstttcctttagaaaaaccaaaggctaggtgtaattgagaatgatcacatattgatttctagctcttattcaaaatctcatttcttcagaaaaggagaatattggaatattagaatgggaccaaattagttagaaaagagtcctacccacatgctgcctgaatatttctttccttttccgctggcttctccacttttcttgccctgattctgcagagaggctaccatagccacagacgtccctctgtgtttttgatcctcagtctactcttctttgatttgccaggagtttctggtaaagcagaaaggtatcattccatgggctacattctgattacaatgaaccaggcttcctcctttgcagttaacagtataatatcaatagtttcatacaagggatgcctttctaagttgtgtgagtacatttattttgtcaatctgtagacttacagatttgctcttggataattgcaaattgagtaaatttatattattatttagagtgaatatggatctgggatatttatttattaaacatttaatgttgtactgacatgagcttatcagtattaagtcattaatccacacaataattctgttatccctcttttacattatagaaagcttacctaagattatacagtaaaatatggcaaagctgagacaaatatgaacaaaggaacatagagtcgaaatagctgtggttcctgttttctaattttctacaaattctagattgcttctctccttgtcaattgcttatcaagcacttgtcatagtattttgtagtcatttgattttgttgccttcttaaaataaatagtacgcacactgacaccaagaatatatttaatttttctgttaaatttgtttttctttcatttttgcattgctaatcctgaagagaaaatcatagactttttgacatataatagttgccacataaattggtgaatgaatatcactgtggcacctaaagtacaccagatctgttggggggttctctttgttttatatttcctgactttaagtgcactcatgtgtttgagagttttattctaaaaagactacttatccaaatgcaacttggctgcctaccatgatttggcaaataaagactttcaagggcagaaagaaaaaaaaaatcttaagattrtttaataacagcatgtaccttccaaagaagctaaagaaaattgtcaagtgaaacagaaaactgtgacattattttattaaaatatgacctacagttttaaacttaacgtatcttataattttatttttcagtaattgtatccatttcattttcccactcattattagagcagagcctttctgtagtggtctgatgttgccaggtagagtgtggaaaaattttcctatagatacatgttcattctgcaaaaagatgggattatattctgtaatgtaaagtgaatatttatgcttttgtggtatcccataaaaaatgtttgggaacaactttgcctttttagcttttgaaaatgagcatttttttatgtgaaagtttgctttattgttggaaagcaagagcaagaaaaaaaagtaggaaatgattttgctttagtaaattgggtttaccaagtctttcttcttctcttgaaacatagtgggaggagagagctttatattcaagctaaaaataatctttgggtaacacctacatttttaccctgaaatagacaataaaatacattcccagggactgaccataaaggggtgtggggagtagaatacttgagccttttcaaattgtctgtctctctcccccaagttcaggaaaccatctgtctccctctactcacatttttcccactaactgaatcctctttattccaasgattaagttcagtgtctttaaatagaaaaatgtggagattttatgaattgccaaatgaaaatgaaaggttcggaatcactaaaattgatggtgttctgattttagaagttagaagaaaattgcaattaaaaatatgatattcaacttattcattggtgaaaatataagctatggaataaaatgtaaagccaaatatatatttatcaaaaatctgcttaaacattgtatagagtttatataataaaaagcattaaagtagtttgatatttaaaaatatgtagtcagttctactttaaattgcatttttattactatgtactcagccctaattcacaagttggggaatattaatgttttgtgcctaccagattgattgctgtaaagaagacagttagtgtgatgatgtagatattaaacaaagtaaaaggcagttaatgcctgaaaatgggaagttcttaaatgtggagctcacactgaaaagaaaaacataaaagagaatcttataggtcaaaataaaattttgaaaatatgaaacaaaaaattataaactaacctatttttttttcattaatccatacaatgactgaacattttacagcagtatttcatggtgtgataaagaacctaatgatagctatttttaagaaacaccatcagtatggaactttgaaggcctaaactcaggacaaaatatatgagatgttgacagcctatggcagatttttaattgatattgcaatcagtgaaattagtagtattgcrtatatttttgaggggaaaaagataaaaggaaattatttttgagtttgaagtttagtgtgtgctttagcctacagctagtattcacagaagattttcacagtctcagttgtgtttaatgtgaaaaatttaaagcataatacataaggttaatacagaattcaatgagcaacataaattttatatttttataacatcccatttggctgtcccaattcatgttgatgtgtgtgtattctaataccatatttacatatgtatataaatatatatgtgcatatatacatatacacatatatacatacatttctaatatgttccttctatttccttctcaatttctacttgaactaatcaaaatatgcagactttaaagatcataatttaaggaattcgtgataatttttaaacaattgtatgtacataggatgattttaaaattcatgtgtgcctgtcagttaattcactgctttgtaggctcctatttgatgctcaaaattaataggtaaacactggatatgcaaagggttattggacaagacaatcctttgaatacttactattttgaaatacttgaagaatcagaaaaccataaatatataagcaactgttgaactgtgaataaagtctgagtgagttaagagaaggaaggtgatttcgtcttttaaaccatgtttaaagtaaatacatatttaaatattcctgcttgataatcataatcgataagtgagcaaacatttgtttttgcaatgggcaaagaccttgctatcaattatacatgtgagattatctttgttttagttttccttctagcatattattgtaaaattaatagtatatagaataacagtttcttgcatactacagcatttttgtctgattttttttcgtagtagccatagccaaatattacatttcaatgccaaaaaaacatgaagctcaatatttctataacaggcgtaatcaaagtatgattgaaaccttggttaccagtaaagctgttcagtattcatagccatggtaacagtaagatttaaaataatagcaatagcatatctatcatgacattatattcatgttattcttattagtcattgcatttataaaattataattatgtttccaaataaatatcttagcaaatactactttctattcaggttcatttataacagctgaagacaaagatgttagtatcttaatcactttggaatcaatatcattgtgtgtgtrttttctctttttcttctaacagagaackgggtttaactttttaaattgtaaattaacaattcataagtgtataaatttatggggtacaaagtgatgttataatttatgaatacagtgtggaataattaagccagttaatatatccatcacctcaaatacttaacatttattatggtgagaacatttgaaatttagattttgaaatgtgcatactctattattaactatattcaccaggctgtgcaatagaactcaaaarggaaaaaaaatcccacatttctgagattttgtaccctttgaccatcatctcattctccccacctccagcctctgtaacccattgtgtattttaaacacaacatttgaggtaagygtttaattatttgggtttttagtatacccagtgaaaactggatttaagggacacagttcaggagatttcattaattttgtatggaatagttgaactaactaaataaataagtggatattcttagaaaccatgtgtagagtaggagtcttttgtgatggccaaataaagagagatcatagaattcccttagtacgaaatttaataaaaggtatgtataacttaacaaaatcaaaacaaacaaaatattttttaacctgtttgcatacaataccatgtctctaaaatgaagcatataggggtagataagcaatcactgtggaaagccaatgaaaatttacatgcgctcattggaatgattacatggtattgagagaattgtcagcattaataaaaccaaagagagatataaaatgaagaattgtgataactaacactactaaagcaaaaagacaagagacggtaacaaagagtggaacaaacaaayatttaaaaatgcattctggaagcaatgacaaatattctgttctggaaaaaaacaactacaaacagaagaaaattccctacaaaaagtgctatgcattttagggtagcgaatgagcatgaaggctttataagccggggatcccttatgatcttgtacaataacttaaagtttctgtgtttagtgtcctcatatataatatgaggtaacatgaaataataataataacattttcctccagaatttgtatgtaattagtagtggtatcatatggaaaacagtgcttggcaaatagtgcttgtgttttagctagccatattttgtctttagacaaacttaaaagaaaaaaagaatttaaaaataagtaaaggaagaaagaatttagaaataaggccacaaagacaaaagaatatatgcacaaaagaaagcagaatttgtacagctaagaatataaaatgaggaaaaaaatgaaacagaaagacctttgcaagaataagtaattaaatataagaacaaacatgaaaattatgactgaaaacggagttggtgacagaggtgaaaggttccagaaaacagtccggttgaatgcagagggaagtaccagcaattaaaacatgtaaaaaggacaaactagatggacagagttttccaaatgagcatgcttggggtccctgaaataaagaagttaacacatttgagcagaaaataatcctcaactatttactaatatagaaaattactgaaaaaaagaaaaatatatggattaaaagagttttacagtattttagggaatttgatgcaaaatgtttaacaggcctttcctgttaggttctgaaattcaataataaataatcataaaaactttaggcattaaactcaaatgcccctcagaaaaaattatgaagtttctcagacttctacaaaagaacactccaatgctataaattaataaattaacagatrggaagttctgatgaacagaaagtgtgatctgagagtttataaatacctggttgtcattcaaataaagacaagctgttaaacaggcagaaactcaggcaaggtgactccctcccatggacccatgagcacttatgagaaaaaccaaaaacaaatgaaattttgtcaaccatgatawgaatraataagtttttgcttaaaaaaagggaatgcggcttggcatggtggctcatgcctgtaatcccaatacttttggagaccarggcaggaggatcacttgaggccagggattcaagaccagcctggtcaagggaacaagaccttgtctccacaaaagaaaaaaatacctgggcattgtggtgtgcacctgtagtcttagctcctggggtggctgacgcaggaggatcacttgagccaggagtttgaggctgaagtgagccatgatggcactactgcacttcagcctgggtgacagagtgatactctgtctcaaaacaaaaacaaagtctttactcaaatgtcatctctcaattaggccattcctgatcatcatatatgaaattgaaacttgtctacctcgccttccttatctctgttttatttttatccatagcatcatataaatacgcacacacacacacacamtactaaaaaaatttaaatgacaaccaaaaagtcttttccatatagatcaaataaaaataaaatgaaaaattttaatttgtatcaatcattattagaagcaaaacttatggatgttgctgtctgtgtcagaaagaaatacaaacccttaaccatttattccactaatcaataaaataaaaattaattaagctctaaaataaattagaaaacctatacaatgaaacaattgaatgccaaagaaataaattttaaaaattatacctgcagaaattttaaaatcagtaaataatatctgtggaattaataaataaagccaaaagctatttagtaaaaccactggtctggctaattaattggaaaacaggaaggaaggagaggaggaggaaaaggagaaggacaaagattaggatgaggaggaagaaagaagaagaaagaaagggggaggaaaaggagaaggacaaagatgaggatgaggaggaagaaagaagaagaagaaagaaaggaggaggaaaagaagaaggacaaagatgaggatgaggaggaagaaagaagaagaagaaagaaaagaggaggaaaaggaaaagaaggaagaggagagaaaagggaaagaaagggaagaaaaagaacatgtaagtgggagcacagaggtataaaaaaagagaattgaagaagatatagggagattgagagtaaaataaaagaacattagaatacatgatatatttatttacaagtatatttgagaagttagatgaagtaataattttcttggaaaccwttaactaacagaattcaacaatatatcaaaaatgcagttcactccagaaatgtgaggtkggtttattaattgggagtgtactaatataaatgtatctattaagacatcacaggagaaaactacatgatcttacagatcttagataaaaattgttaacattacttaaggctctgaaagttttgtcctccacctacccctccagttctaacttatattacactctaagaaatattttgctgctgtttctttgagatactgggaagtgataaatgtgttgcattttcttagcagcacttttaaacttaatattacttgacaattaactggtataatgaaaacttttcagtttattagatgaaaataaaattcaaagaatataatagtattgtcttttatgtcgttaatttttgttttatttaatactaggagttttacctaacaattatttttaaaaccttactcaaagaagcacagcaaatgtttgtcttcttgttttgtttttgtttacttttccaaaaaagccaaatgaaactgtatacaaggaaacatgttggttrttaggtgtcatgccatctggcactgacatctgccaccacattgaccccaggttattttggctgctttgcctggcaaggagggcacctgcctcttacttcacagctccatgctgggcattccacgtctgcagtttcygtgaagatgtcaatcttcccacatagaggagtatgttttaaaattaaggttataggaaaaagaaggtagctttctagaacttctaagtatgctatggagtccataaaargtatgctgattttcacttatttctagaaaattaagtataaatggtaggttggattttcactttcaactactgaagccttaagaagaggttatattgtaatcttgaatttaaaataaatggattcacatgtttcatatgcttttggtcatstacatttctccattttaatagtaaaattaaacattattcataatttascttgttttgtatgtcttctttgggagacttgcttataaaaatcacatcacaaggtttgcaaggtttgtgtttccttttcyagcctattacacatwttcttttaagaaagctcattttaaatgagccctttcaagaataaaagctttttagattattttttgtatgaaatatattcaaaagttacacctcatgcacctagcattttaaaccatggttccaaaggattctgcagatttaaaggtcctaccgttttttattgttatttttattacttattttctttttcctttgaagtatttaaagttacagaaggtggaatatttaactttggccatgaattattcatatttgtttagaattaacattggcttaaatggcttaacatttttctttagttagtgattcttagattttctaatgcagctcataaggctacatttctcagctgggtacaaaacttgatgaattagcagctacaagctatcrcaggaaacaaacccagaccttgcctataaataactgtctagttttaatctgattttcttgcatcatataaggtacagctgcatataggtttatatgttgtgtgttcatatctacttttgagtagatagtggaagcaaatgaatccaataaatctccttaaaatatttctgcttcaagaaattcagtatccttccagaaaataattgctattttgtctttttttwaaaataacaaattgtgaagtatatagataatatattcttcaggaagtaattcttttgattctatattttataattacactagcatctataattgaataattgaataaaatttgtttacaaatatattgctatgccttaagatatgacatattttgcacattttacataacttgaaattgtgagataacatcattattcaaaatatgagtgggagtttatacataatgaaaataaataataaccaactcccttaagactagtaataagccaaagaaaaaaaacagttatgaaaaaggttaacttaaaggcaccatggaaacaaaaatactgttgtttttataatcaacatcataattaggaataatttggaactacaagaggtcctagccatcatttagttcaatttgtttttattgtggacaaacagacttggttaatagcaccataaactaaaaacagtgttaggatcagggtcatatcacaggtcaaatgataataasaatttccttgctaataatagtttgatgagagccatgggaaaaactgtccttaggagactgcctgtgtcaatctattataaacaaatgtgggtggcctcaaaaatatgaatgtgaatgtaattaatttagaacactaatgaataaactgtgtacactaacctatatatatgttaaagagaaaatatgaaaataaattacaaagatcaatctaagaatgtgttcacatattaacccatacctgtggtctctgaaagttgacgacttgttcaactactgatcaaaaatcgtttggaactctgtggatatgcttgtttttttcaattgctgtatacctccatagagtacaaaagactgggggacctagtttctgccatcagggagctcaaattcctcctgggaaaaaatgatgctgaaatctaaaataaaaacataacactctgtggcttatatggccacataactctgtggtctaatctaaataatttgttcaataaaagtttaaaaatggtaactcactttgaatggaccaataagagaaagtttaaaatttgagtagcaatgaaatagtgggtaatgggagaagaaagcaatattgtgagaaggataatgtaagtgaaggacagaaggggaaatatctgagtgatattggagcatggtgtgagagatgtttagtagatcatttttaaaagctagattagggggctgggcgctcaggcctgtaatcccagcattttgggaggccgaggcaggcagatcacttgaggttagaagttcgagaccaccctggccaacatggtgaaactccatctctactaaaaatccaaaatttagccgggcctggtggcaggcacctgtaatcctagctactcaggaggctgaggcaggagaatcgcttgaacctgggagatggagtttgcagtgagctgagattgtgccactgcactccagcctgggcaacagaatgaaaacccatctgaaaaaacgtataaaaaaaaaagctagattagggttatacttttggggttttgaaatgccatgtcaatagcctgggaatcaatctctcattttattataagtgattatgatttttttcagaagagaaatgatataagtctgatgcttaaagatatttatctttagtatgtggagcacactaaagaaataaaaggataaaggagatgcaaactgttgcattagccatggtataagatattaaggaccccaactttattaagtcacactactattcaagcatccaaccatccatctgtccattcaacacttatctgttgagagttgactgatttttaggtagtatgctggagcaaaacaggactcaaacagatatctcatcctcaatttaccttgagtttacagatgtatagggagtgtatgtgtgtgtgcttgtatgtttatggatggtatgtaatgaagtgacgagacatataaagtgaaaattatcatatatattgctctaagtgatatgatagggttatatttgggcgtaaagacccataaccaccatgatgaggaagattttctagaaataatgctttatggactaaaaaatcaccttgatttacagaaatattggaagcagtgggattagtatgtggaaaatatagcactggagagtattaaagacttgccaaacttaatatggtgcaatatggttggaataaagttcatagtgaaataataagtcatgaaactggaaacagttgcactccttgaaagtacagttaaacaatactcttctatcagaaacatcactccattatttttcattttaattaggtcatttatttagtgatcaattgctttaagacatgtagttaggtctatatttaaaaagtgtgaaaaaatgatacaactgatgcataattttgggggaacattctaggtctttcatgggagacaattcttcatgggtctccagcattttttcatgtgttgtgagtaaacttgctgtttttgttatggaccrtcttttcaaggatatttttacaaggaaagctatagaagatatagtgcctccccttggaacaaaggacaagtatgtttactacccatggtaaaatatttgagtttataaactcatggttcttctcctgtaatgcaaaccackgcatgtacagatgtccccctttgcattcccctgggggagctagggcactgaattggcaaagaaaatgccgatactctagatactgctatagttgtgactaataaagtccttttccttctgacccaggagtcttgtggcttttgccaacatccacgaaactgtagcaggctaacttattagcttgcaagtaaggtaaaatcttagacccttcatagttcctgacagttttggctatgaggatgtgaaaataaaaaatgttttatttctagaataggatcgatgagacgcttgtgggtcaattaacagaatttgaagaaagtgtataagaattggcagyaaacatgttgatcacattaatggtcaaccaagcaataaattatccttcacttcattgctctttaataaggagaaattggaaagttattagcagatagaatactggaaagcgtgcataaagagagctgcttraacagtgctggacttgttgcaaattcgcctccttttttgggaggggggatttccttgacaatcaattcaactgatgggattcaggcaaggtttgcagtggagcaaggaatctaaaataatcttgtgagtgaggccctttgggaaaattctatgtattgttttggttgctgtcattctgaatatatattagaaatttgatgcattatatgctcatacttccctgtcccatatgtgtcaggtaaaaactactgatgaggaattacacaaagcattgtcctcacccactcatggtacattgacatcattggacaattgacctcctctcagggcacttagtagtacctcactgctgatggtattttttcagattacaatgctattccagttaaatcagctgactttggccatacctttatggaccttgcaactaatcattgtcatgtactttaattttcagacttttgcagtctgatattagtgcttcttttattaccaaaaaaaccccaataattaatgggctgatagttaaagtatatccagtggaacttccacactccctaccatccacgattatctgttgtttttgagctttggaatgggctcctaaataatcaactcaaaaataattctcactctactcycttcacttcctcctggtcaataaacctagaaagaagattggccatgaagtgcagctgtcaacagaaaaggatcttagtttggcagcctcactttggcctggtttatctaccctctgagtagtatctcagccaaaatggggactcaaaacttaattctagttcatccaactggattcttttgttagactgacatgcttctagattggttatgttgctcactaggtcctcctggaatagtccacatgaaccaaaatgggcggtacatcgggtctgtgttggatttaataaaatgyctttgccctttctcactcattccttccagatgacagagctaggcatgagttggggatgactggaaaaaaagtaaaatatagctactagaatgggacacatgggttttgtgttagtagaaggagagtaactgcagaacctggagagagaacaacttagaccctgacaggtacagaggaggaagggccatccgtgatccttctcttcagaaccactcctagatccttcctcgtagagcaaaagaccctgctgtggctctcttaaactactgaaatatccctaaacttaactgaatgctgggtcctctgtgccccaccacataactctaaccatgatttgataatcatttcccttaattgtagtgagaaatctgttggatgcagctggaattgccccagattttccacctcccatgcaaaacattgccaaacctctggatgtcctccacatgctgatttcagtagctgtctccagtcattttgtagagcagacacataccatttgctggctggcatggacataaatgcaagttggactgattaacctgaggcagtccctccaaaaactaggactagattcaagtattcaaatttaaccggagactgtaaggcttcctggccagctgggaggccatgttggaggcactgccagcttgacctccacatggggaggaaaaacagttgtaaaaacacttgttctaggggcactatgtgtggccctgggactgtacattttgtgtagatgccaggaattaacttgcctctcttctgaaaacacagtcatatgcattatagggtgatcacaattgaccttcaagtgtttaaggaaaacatcaccagtagattatataatcttcagatgactgcagagatctcttcaaaattaggctgcctgtggttactcaggggatcttcttggaagagtgtttcrttattattgcacaccctatgtgaagttatctctaaaatgggattcactaatctraaaaggcagtacaacatttctccttgtcttcagctaaagtaatcagtgacatagctttggctcttgaaggcattcagtctcagcctcaattaactggacatggcagacatagaagatagatttgccctagactttctccttacttccaaagctgagcctgtgtgatttctaatacatctttctgtacacctggattaatgccttggatcaagtggaaaggtcaataaagaaagccatttggctttttaaggtagtccctgatgggttgtaggatttgtccagttgtctgtgtctggaaccctggggcacatggttgagatcatttctacaagtcagtctcttattgctgctcacagtcctgtgtaactttaattaaatgctttatgggataaattgaatggatatggtcccagcctctgtcagattaatcagagtggctgacaggtgatgcagtcatgggaaaattctccaaaagttaagacactgtagaaggagtttgatgttaaagacacaattctccatggatctctcatacttcacttcttgcaagcagaggcactcacataatatttttaaggatatttgtacagtgaacagactttgaaggtagagataatgtctccttccagaatgaacagcaggtatggttactgccagtcatcaaaggtttgcgtttcacctgcaccacacatacagtgcttgtctcctgtaacacaacccagagcatgtgcaagtatcatctagttcttcgtgtttacctgtgaaaatggcactcagggaacaggcacctaaaaatgctgtcactctggttattgctattgatctagaaaagttctttgtgtctgtaccaggatttttatgttttcttctagcatgcacaaaatcatggtggactaatagcttacagatgggataaaatttcagacactgcacacacattcttcacagacacattatttttgaagttataaaataatattaatgtgttgttaaagctaattttcagagaggggattctattccaccaacatttatgactaggtaataaaatctcatttttactgaaatttagctccataaaatgcattctatttaaaatctgaacatgtgccaaactatcatcaatactgtrtaacaccagtataattaggtagaagtactggataaactgtatgtaatatgtgcagcagaatcctaaatcattctaatggaaaacagattatgccagcaacatgtaaatacaaagaacagtggtctccaaggaaaatatcagtagcacatcaaaatctattaatttgttgaagaaatagtatctaagagattcaattaaacaaaataaccagagaatacatgccttatttttggaaacgtaaatattactaaaattgtattaattagcaatctcatgaatattatgttttactaagatgtaggaaaccccatgtaactcaatgtaatatttcataatagatctgattataactgagatgagcatttttacagggattaacaaaacataattggaaataaatgataattagataaattaactgtgggtggaaaattttcatagaaaataattgtcattcatttaaaaaatgtgtttttattatgaagatggggcaaattatagaaatagtgtcattgtcttttgttgttaccattttaaaatttcatctctaattctcctagtcatttagtttttatttcttccctgtccacaaattatattaagcatttgttcattcattaaytcattgccttattcatttggcaagtatttatggaacatgtattatttattgaacaatgcttttcagctctttatggcattgtttagaatttaataatttcaagataatcctaggtctgctatcactgaacctacctctgccttcagtaatctcagtgcttgtaaatgaaacagctatttttagctctgatagaactaaaatctatacctgtcttggaaactgcaataattaataacctgtacttgtaaaatactttatagttttctgtcagaattttatgttaacaacaaatgtgagctagaaaagcagaaccgattgtttctattgcacagagaaagagcttaagtctttaagagggtaagtgacccaaggctaggttgcagagtcaaaattagaatttcatttcataataaattgtatgtcctttcactatgctgtacttatactggcaaatgatagagtgggttcagagatttctaattgcattgtgaagttaatccttatatccttagtggcttttggaaattacagtttaagactggatctgactgaaccagcattgaggacataagcttattttactggcaactctgtgatatgtcaaatatgcctaagacaatgtatttgattttgaagttgagaattgcataagtaaatcaagaaatcgtttagtgttataaattggcacctggtttctgacatagttgtttaggttattatttttagcaaaatagtacattataaatgtgcagataccctagattgttttacaattgagacatgaattcttctcccatatgagtttatattattaatgtctctctacagagaatagtactttatcccctaatttaaatatatagtaactcagttcttgccacatcccattgttcatggaygtgaacaggaacacacatctacctagtctcttctagaaaaataattatcaggaaataacagaacttaaagacaggattagaatagagagcatatcagataagagcgaaaacagagtgaaaatttattataatcgactgagctatataatgccaagaaataaaccatgaaaaatttctgtagtttaacagcaacacagatttatttcttgctcacacaaagtttcagttgggtccggcagctcttcaggactgctctcttctatattgtgactcagagagccaagctttccctattttgtactcccatcattttaatgtgtggatttcctgagctatctggacaggggaagacagtattaaaggtttatacgggatgtttttaaggtcaaaacctggccacatggctctaacataactccaaaggaggctgtaatatagaggttaatgccatctataggacatagttgaggctctgaggttaagcaacaaaaataaattttccctcgcgtcagataacaatgtgaggcacactttcaggaacttgtcaaggagcttggggatcagtgattgcaatgctttcccacatgattaatggtgatatagaagatagaatattttgattataggggaaggaaaaaatggtatatcagaggagccattatcccagtagagtgaggcaggattggtgatgatagagttaaggtgttatgactgaaatctataaaataaagaaatggcaatttaacttctacagacactgggatatatatgatatggtataagaaatgggagattgtgttagtctgttctcacattgctctaaagaaatatccgagactgggtaatttataagcaaaagatatttaattgactcatggttctgcaggctgtacaggaagcatagtggatttggcttctggggaggcctcaggaagcttccaaccatggcagaaggcaaagggggaacaagatgtctcacatggcaggagcaggggcaagaggaagagaagggggaattgctacactcttttaaacaaccagatctcaggagaactcactcactttcctaaggatggtaccaagagggatggtgctaaactattcatgagaaagccaaccctcatgatataattacctcctatcagaccctacctccagcatttgggattacgattcaacatgagatttgagcagggacacagatcaaagctatattaaagatcttctcagggttataataaaagcactagtagttgtgataagcattgtgaacgtctcagaaaagtggttaacaaaaataagtgatactttagaggacagatgtatgatgtggctraagtgagaaagcaataaaatgaattcctctctctttataaaaatacatataaattaaataaatcttcaggttctaattttgataaatcctaaaaagtaatattttagttacttaattattaagtagttaatgatttttaactatgttcaaagcgtttgatatgatatcattattggtgtcttcatatacttttccattcacttttgattgtttgcttattcattatgtacggaaagatacaatatttagcctcgactgaaattgctgttgtccctcagaatacatttaaattgtttgactttgtaaatgtacaagttatttattcccttattcttctttgtaaatttgccttctttgtattttctgaaaatatttcaactattttcaggtttctgttatctggatctagccatgcaaagaaaagttgtcattttccatacctttaaaacttaaaattgacaaccattcccaatttatttcaatttctaggtgagatttagagtttcatttatgatggaatgacctccttagggacagacatctaattaatagttaattcatttaagaaattcaaggtactgtgtttcttctccctgctcccaaagagcttatagtccaatcagggaaacaaacaggaagtgattgcaattcagggctgtgtgctaagtgagaartaagcaggaaacgatgcgggagcacaaagatgggcactagcctggaccagagttgggcactgatggcacccaggagtgctggcccagccagtgtcaaaatcttcaatgaatgtagcaagaacagaggaactaacaatgctaaagcatgtgcctcctatgagcaaggattgttcagtgagggcagagtggccatgacctgaaagcaagcctgggaaaccagtgctgatcgtgccccactacccacccttgtgataattaatatgcaggataattagggcagaagagaatgaccaggcaggccttcattttaacatcctgaattactttggattattcattttagatgtaaagactttttaatttcatatttatgcaagacttttctcagatttatgaaacaaatttgaaaagtcagaatattttggaactaatggtatattttacgggaaaatggtgaaaacaacagctttgtaaaaatataaaggctgattacaaaaggctgaatacatatatattttatattatatatgggtgagtatgtttataaaatgcaaacaaatttatatgtaactattgagaagttttagtttttaatattttcattccatagaataccatggtgtacacagtattaatcatggtcactttgtttcagaaatgtaatgatcctgttgctgtaaaggaaaataaagaaagagggggaaaatgcacttaataaatgcgttccagagtaatgttcatagaaataaatcttagtccataatcatgagaatgaagggttgataagttgccagaggaaaaaatgatttacagtaatatgaattttaacacaactgtaattacatttaaaatttcaatttgtttaattgatgtttctccaaacttattatttttaatactcatcattatttatataccttcaataattattttttaaattccactaatttatatattaatgaatttgaattgactggtttgtatctgtgggtttttagtactgaactagatttctgttaattgtagagcacttcatccatttagaattttttagtctagttagatgcagtaaaaactggtgtgagtggttggacaggaaacaatatttcaattttgtgtctaattttttgagtgatttggataaaataaaaacatttgtgatgatctaatcagtgggataaattcatytgaaaatctttatatcaaataggtaagttagcaaacatgccaaactaaagaaatgaaccacttctattttagcttgactttcatttgctacaattattttttatcctaataatattttttgttctctgcattttagatgaaatgaatattgacatgtatatatttatgaatacatttatgtttgactgtgtttgttttattttagagtatatgtcaatattgtgtgttttaaactaatccttcaaagactaggaaatagaactctataccttaaccgatcagtaggtacttaagcactaaagaaattcctcttgataataaaatacttccaaactactcatgtttgtatattaatattgctgaaatgtttgtccttctttctctgggatgaggtagcaatgattttattttagtaattgaagtataattcttttcagaaaatggaatataaagttagtctttcaaatgaatgggaaattctaatttacaagaaaaataaaagcactctgtaattgcctatgatgtactacttctgcctgtgaggttgcatttctctgtaccttaatacaaagtacagtaatagaaaaatgattcagtaagtgtaattctattactttctaatatgacaccaatatgatacttttaatgaatgaaatacaaagttattttaaaaactgcagatttgtcattaactaaaaaatgttacattttatgtgttagagtgttcttattcaactatttattgctgagtattaaattgcacacttcaacaccgtgtgttattgcacagtacttaacaaatagtaagtccagaataaatagttattgactgaattaatttattaatatattcaaggctgttccaggtgttgtgggagctgcaaagggtgagtaatacaccatagcttctttcaaaatgaatgatacaagtaagaataatatgagatcacatgggaagaaattaatgttgaccgtagccaatgagagaatctttataaaagtcatagaatataagttagatattgaggatagggtaaataaaagagaaatttggctaaatttgcaaccgtggaaaagaaagaaaatgtcaagtaaaatcggaaaggttaggcttaaaaaaaacattttgaaacagcacagtaaagtatcatttgaatacaaaaggaattatagataggcaaaatgaattacagattatcatgaataatacgatcaactttaccctcactttacagcaaaaagaatcacaggccaataggtgagtttacatgtttgagattccatagaaaatagtaaaaatggtagcataactgtttgggaagtcataaggaaagaagtcaagacttctctttcaaaactttccaaactcacgtatattcaaacatctggaaaaatgctagcagccttctaaagaaatggctcttagtatttgagaagattacctgtagtattaccaaaggccacacacacacacgaagggaagcgtagtggagaaagttttattcttcaggccaaaaacacatatatttaagtcttggttcagccacttacttgtgttatggccttaagcaaactatataatttttcttcctttcttttttttttcttttttaaatacaggattttgttttgttgcccaggcttgaggacagtggcacaataataggtctttgtaactgtaaagttctggactcaatcattcctgctattgaaggctcctgagtagctaggactacaggcctgtgtcctgccaccatgcctggctaactattttaaattttttatttattttcttatttttatttttgtagagacagggtcttgctatgttgtccaggctgcgcttgatctcctgggctcaaacaatcctcccaccttgacctccccaaactctgggattaagtgtgaactaccaggcccagccaagctgtttagtttttcgaaccctcgttttttttgttgttgttgtttgtttttttggtgcaatcattttattttattttattttatttttttaattatactttaagttctagggtacgtgtgcacaatgtgcaggtttgttacatatgtatatatgtgccatgttggtgtgctgcacccattaactcgtcatttacattaggtatatttgctaatgctatccctcccccctccccccaccctttgtagggacatggatgaagctggaaaccatcattctcagcaaactatcacaaggacaaaaaacaaatcaccacatgttctcactcaaaggtgggaattgaacaatgagaacacttggacacaggaaggggaacatcacacatcattttttatttttaaaacaatgtatgcctttctggctgttaggatccatttagaaaattttttcttgcaatgcattcttagaagaatgggctaggtgattttcctaaagtgaatatctgagtatcttacattctggtgatttctaaacttcttaccggcctgaaaggtattacaagacctagacactgtattcctctctaacttcctcttggagccwctcctctctgttccagtcatccaaggcttctctatgccccactaatggaccaggcttacacacactttacattttaatttttatttcaatagatttgggggtgcaggtggtttttggttacatggatgaattgtatagtgaggaagtctgaacttttagtgtacctatcatctgaatagtgtacctgtacccagtagataattcttcaaatctcactcctccttgcaccattcctctgagtctccagtgtctattataccactctgtatggccctacatatccatagcttagccccaacttataagtgagaatatgctgtatttggttttctgttcctgagttacttcacaagatagtggcctccatttctatccatgttgttgcaaaagacattatttcattcttttttatggatgagtagtattccatggtgtatatgccacattttctttatctactcatcggttgatggacacttagattcattccatatctttgcaattttgaattgtgctgtgataaaaatataagtgcaggtgtctttttgacataatgacttagttttctttgtgtagatacccagtagtgggattgctggatgggatggtagatctacttttagatctttgagaaatcttcatactgtttttcatacaggttgtactaatttacattcccaccaatagtatataagtgttccttttttttttttaaccatatctgtgtcaaagtctaatgttttttgactttttagtaatgaccgttctgactagggaaagatggtgtctcggtgtagtttttttttttttttttgagatggagtctcactctgtcgcccaggctggagtgcagtggcgcgatctctgctcactgcaagctccacctcacgggttcatgccattctcctgcctcagcctcccgagtagctaggactacaggcgctcaccaccacacctggctaattttttgtatttttttggtagagacagggtttcaccgtgttagccaggatggtcttgatctcctgaccttgtgatctcagtgtagttttaatttgcatttccctgatggttagtgatgttaagcattttttcatatatttcttggccatttgtatatcttcttttgaaaaatgtctattcatattgtttgcccactttttaattgattttttcttttttcttgctgatttgtttgagttccttgtagattctctatattagtcctttttcagatgtatcatttgtaaatatttttcccagatacctgagagtatrtttaaccaaagaggtgaaagatctctacaagaagaactccaaaacactgatgaaacaaattgtagataacacaaacaagtggaaaaacatctcattctcatggattagatgaatcaatattgtgaaaatgaacatactacccaaagcaatcgacagattaaatgcaatttctatcaaaataccaccatcatttgttcacagaattagaaaaaacaatcctaaaattcatatggaaccaaaaagagcctgwatagccaaagcaattgtaagcaaaaagaacaaatctggaggcatcgcattaccttccttcaatttacaaggctatagtagcccaaagagtatggtactggtataaagcagatacgtacacaaattgaacagaatagagaatccagaaataaagccaatatctataagcaattgatcttctacraagcagaccaaaacatactgggaagaggacaccctmttcagtaaatggtgctgggacaattggagaggcacatgtagaagaatgaaactggatccctatcactcactatacagaaattaactcaagatggattaaagacaaatatatgacctgaccccataaaataccctaaaaattctaaaaggaaacttaggaaaaactcttcaggacaatgacctacaccaatgatttatgactaaaaccccaaaagcaaataaaaataaataagtaggaccaaattaatctaaaaagcttctgcataacaaaagaaacaatcaatggagtaaaaggacaacctacagaatgggagaaaatattcacacctactttagatgaattgcacctgctgtttcctattttgggaatctttttccttctgattttcatatggctgctgcttatcattcttgactcagcccaaatgacatctttagaaagacattctcggcccacctaatgtaaagtagctgtttcctgcaactaatatggtgtttttttatgtcatttatcagtagctgaaatgatctgttcatttgtttatatatttgtttattgtctaggttaggaaacttttctttcttgttcattgttcagaacttagtactatcctagttggtaagccctcataagagttaatgaataaggaatacgttaatttttattaccagaattatgagttcaatatggaagatttggcggaaagacataaagaaaaaccaggaaggctttaacctagacatatacaaacattttggttattttaacattatgttactttagtaaaatatttgtttttatttttcttaaaaaataagcaatgattaaaaaaaaacctctatgatactccttacctgcagatatggctctaaaatatgacaaaatagaaaatggcacctttttttaactttaggcttaaataatttaaataaggctagattagaagaaagccatgcagagcctatggaaacatagtgtatgtgtaacaaagaatttgaccttgccaaagaaaagaggtctgtcctttgccctcggtttctgagaggtaatctgtgtcatacctgataggagtgtctttgtttagaatggaggctggccacacttaataatcttagagtagaggctgactaagccagaaagatcaatcatgtgatttaggatggtggctttgggtcatgcaatatcagtcaacttggaggctgagattaaccatgtagtcaatcaatcaatcagtcaatgatacctgagtaatgaagccttatgagaaactctggacattatagctcaggcaagcttccctttttggcagtactccatctatgttgccacacatcaattccaggagggtaataggtcctgggtacaacagaagcttacatttgaatccttccagtttctaccctatgtgtcttttcccttggctgrtattttatctgtaccctacctccataataaaccataaccaaaaacatagctttcagccagttctgtgagtcctttcagtgaatgattgcattagagggtggttttgtgaatcctgcaatcttgctgttggtgtcaaaagcaaggacagttttgaggactgtgctctcagactttgagtttggctatctcttgctagtatatcaccatgagaaagaagatgttggttgtcttatagatgttaacattttagacttgaacggcttgcaggtaatacctattctaatatttcattttatggaaaagcatgaaggagtttatgatttgctttagttcacaaggctgctttagtgactgggtcagagttagaaatcaggtttatcaatctcattattttgggtttcccactatatactgtgttatttgacacaagagtgacatagtaagtatcacttgagtacaagtgatgtttgtttgtttgtttgtttgtttgtttattgagacagagtctctgtcacccaggctggagtgcagtggcatgatstcagctcactgcaacctttgcccgctgggttcaagcgattctcctgcctcagcctcctgagtagctggtattacaggtgcctgacactgtgcccggctaaattttgtatttttagtagagacggggtttcaccatcttagccaggctggtcttgaactcctgacctcaggagatccgcttgccttggcctcccaaagtgctggaattacaggcgtgagccaccacgcccggcccatttgatgtttatttttaaatattatgataatttttttttttgagacgaagtctcattcttgtcacccaggctggagtgcaatgtcgtgatcttggctcactgcaacctccatctcctcggttcaacggattctcctgtctcagcctccaaagtagctgggattacaggtgcctgccaccacatttggctaatttttgtatttttggtagagactgggtttcaccattttggtcaggctggtcttgaactcctgacctcaggagatcygcccgccttggcctcccaaagtgctgggagtacaggcgtgaaccacctcacctggccctatgataaatattaacttataaattagtaagatgtttatctcatagtattgtatattcaaagataaacttagaataaaacttgtatcttaattacaggaaaaatatccatgccacaaaaatgtccattttttaagaactacaacgatttttaacaagaaggtcttaattttgctttgtgattaacattatggccactggtttaacaagttaatgtattaggttctctttggctaactccagcatatgatgagataataacgtgatgggaaattcatacaattttcagaattatacacactgacagttgtgaaaaataaacatttccagtgaggctgacatgacaactttagggaaaaaaagcaagcattactcggaaatgctaagacaactaagcaagtatagggctatatagcaagtaaatgtctttaaayattcctctgtattacatatgagtgctttttctggataatgtattttcatcaaaataaccaacatattataaaaaatgatgctttaaaaaggaaactgctgttcttcatcaaaatagtttggaaacatgacatctcatttcctgtaattaaatgagttattattatcatttagtgacatcataatgggatattattaggtaaatgagatattattttctttacattatagtgatacaacagtagagactctgaaacctcaagaactgatcagatggagcacaaagagtgagatagttatatttctccagacttttctagcaggaagtacaataaatagtccgtatttattcctttgtaactatcttctacttaagtggacacagcacatggtgtgtctgttctgtgagtccagcacatgctgaacataaaaacaagtattttttaatttctagttttttttwaattaaaagtattatagagatgcagtcttgctatgttgcccaggctggtctccaactcttggccttaagcaatgctctcataaaggtaattcttttgagaaaagctttttaacttgtctgtcattatcatgaggcatttttagcacctattatatgtattgtaaagaaaatctgtcatataataaaatctagatatattaccttgtgtttactctaccggcatttgagaaaaggggatacactcagtaaaggtgcaatgaaagaaattcaaatgacatttttagaaggcagtatgtttggctaaagtctgcaggaatcaattttgcagaggtagagataatgtaggcatttgagtaacaagggatttactgtttagtgttctgtagacacataccatttacatctttttgtgtgttgggcagtgaatatatacaaatgagaactgtatttttcatttcttaatttcaacttttattgaatattcrggggtacatgcacaggtttgttacatgggtatcatgatgctgaggtctgaggtacaatagatcccatcacccaggtaggtagcattgtacccagtggttaggtttttcacccttctgaccctttatctcccacatgccaagtagtccccagtgtctattgttgccatctttttgaccagtattacccaatgtttatctcccacttataagttaggatatgctatatttggttttctgttcctgatttaagttgataatggcctcygcctccatccatgttgctgcaaaagacatgcttttgtccttttttatggctgtgtggtattccatagtgtatatgcaccacattttctttatccagtccaccattgatggggtcctaggattattccatgtctttgctattgtgaatagtgctgcaattaacatagatacaagtgtatatatctttttggtagaattatttattttctttttgatatataccagtaatgggattgctgagttgagtggtaatttcgttttaagttctctgagaaatctccaaactcttttccatagtggctcaactagtttacattcccaccaacaatgtacaactgttcctttttctgtgcagccttgcaaggatctcttgttttttgactttttaatagtggcccttctgggctgggcatggtggctcatgcctgtaatcccagcactttgagaggctgaggcggacagatcacctgaggtcaggagttcaagaccagcctggccaacatgatgaaactcccctctactaaaaatacaaaaaaaaaaaaaaaaaggctgagcatggtggcatgtgcctgtaatcccagctactcgggaggctgaggcaggagaatctcttgaacctgggaggcggaggttgcagtgagccgagatcgtgccattgcgctccagcctgggcgacagagcaagactctgtctcaaaaaaaaaaaaaagaaaaaaaaagaaaaagaagtagcccttttgtttgtaacacaaagaaatgataaatgtttgaggtgatgaataccccatttagcctgatgtgattattacacattgtaggcttgtatcaaaatatctcatgtaccctatatatataaatatatgggggtatatatatatatatatatatatatatatatatatatatatacacacacacagtgggtaaatatatatatatatatatatatatatatactgtgtactcataaaattaaaaataaacaatttaaaaacatcaatagtaataatagccattttaactagagtgagatcgtatgtcattgtggttttatattttacaaatgggtaatgagtagtgtgtagaacaaattataaatgagagttgaggaactagaatggtggctggcagaagtttatgggaacacagattagaaggtaatgaagtacactttgttactgaaatattcaattcctctagtacacaaagaagaatgaaggttagaaataatcacttttcccagattttttttatatgtgaaagttttaaatattttaactcttatattattttcccccttaccatgtttatcacctgccaaagaactacagtataattgaggtattttattgaagagaaatgttgctttcagtggagttgactattttataaagaatatttaagtattgctttattgaccgtgatacaaactcatgcagttaggtttagaatcaaggagatggtgtctgtgatgttagttctactttgtcatgagagtagaacctctattatttttgtttttcttctctaatattttaagtgataaaaagaaaaaagcatgaatttttaaactaacagcagtcattaaattttaactttgaaataggaagttttctacttaagtaatatatttatactcatcagttttctttttctattacttaataataaaattatatttactttattcccatgcacacattaaaatgaaagtgttctgagtttagttttaaattttgtatggattcagatattggtttaaattcatataaattatgaatccatataaatattagctttttctaaacagcaaagtattatagcataacttttaagttttagtattttagtagtgtgctacttggaaaaattaatattgtaatttaccttttctcagcataagaggaagaatgaaaaattctgggcatacctttcagaatctcattttgctagatatttcacatttaaatacaaaaacacacagcaatccaaactaaatattctcctttgcaaaaatgtataatgacatcatattataataaggaataacataagctctctattcatatttgcaaaatatatgtttttggacttgtaatgggacttgcctccagagcaagaattcatagaattaagacacatttttgaaaatattcatgaaagatgtattttgagttactcaaaaccataaggtaaatcaatacttagcaaagaacaagtgaaaatactttgtggctgctatgctgagagtttaaggcaattctatcataaggattgagtatgctttcttaacgcaatccagaaatcagagccaaataactatcctcagagcagtaattatataatattgccaggttaattgtcttttcaaaaaataacagtgaaatcacagtattaaaaatatatgcactactggtgtattgttttctcttctccactgcatacgtagtgtgtacaactcaacttttaccaaactgtatgtacccagtctattcctatgtcttgctcttgactgtgtcaatgatgaaatcttgtcacttgtacatctctcatttttttgcaatttataatttatcttcctgggataatgtgatttacttaaggacacttacctaattagtttatctctttttttcccaagtaaaaaggcaaatgtaattaattgtaaggtaagtctcagaatgtttgtgtttagactgacacagggaagtttgactgaggatcttctacaataactatgtcacaagtgttttaataataaaactgtgtttccctgtgagtcactctgtagaatcctatggttggaatagtggagacggaaatgtatatcttggcagcacctgatcgtaaggtagaatgactagaagaatgctgactaggctgtaaacgtcttattaatttaaataatcctctccatttttagacctcacaatgattacagcagttatactatgtcaagtaaatataaaataaaaaaccactgaagtccaaagcagcatgtcaaatattgcccttagatattttaggcctgttctgatagttatttgactaaaatataacagtatagatatgtgattaataacttctctatgagacataattaatgactgttttagtaatttaaaaatattaataaagagattcatgaaactactgggttgtttgggaaccgactttatacaatagttatatcttcctttttttttttttttttttttkgggacaggaccttgctccatcgcccatgctggagtgcagtgtggcacagtcatgactcactgcagcctccaagtcctgggctcaagcagacttcttgcctcagccccctgcgtagctggactgtaggcatgcaccaccatacttggctaattaaaaaaaaaaattgcagagaggggggtctcgctgttttgcccaggatggtcttaaattcctggctttaagtgatccttgtgcctcagcctcccaaagtgttgggattacaggtgtgagccactatgcccagctgaatggttacatcttacttttttttttttttttcaattctgtagcttcagaaattcattatttctgccattaggaacaatgatctggagaattgattcacactaaccaaacataaggggctgatttataaatcatatttgatttacttatgaaaggcattgctatttttttactagaatatagttatctataagatatatgaggaragacaccatgccctttacattcattgtcatatccctagagcttagaaaattaattcttgaattacttcactaataattactcagtttagtcttaatgcctcttgatatcaagtcatttgggagattacatgagtagtcagtatggctgaaagatttgtaaatgtctccttttgaagagaatacttcataacattgtgtttggtttagtatgtaatttactaatcttttgacttttgttaataattagcatttccttacagttaaacaaactcttctaaaaatagctacataaatcttacataccaattaattagaacacgtattacataacatttttgatggcctttatatatttgtttaaattttatataagtaaattctttccagtgtgtaattaaaatgcccagtgtaatatatcaatttatcttaaatgctttaaccactttaatgttatttattttatacatatatctttattttttatgattctatgacatttcatgttattagttgaaaaataaaaattctgttttatggattcatggtgtacaacatgattttgatatatgtgtacactgttgaataaatcatatttgtcttcctggataaataacatagccatcacctcacatatttatcatttttgtggtgaaaacattttactttctcagcaattttcaagtatacaacacattattattaataatagtcaccatgttgtacaacagatcttcagaacttacttctcctaactgaggctttgtacttttgtccttgatctcccttttccacacatacctcagcctctggtaaacaccattcaactttctgcttctctgagtttgtttggctgtttaagatttccacacccatgtgagatcatgtggtatttatgttctgtgcgtgacttacttcacttagtgtaatgtcctccatgttcatccatgttgttgtaaatgacacgatttcctacttttagccacttttaaaggagaaaattgtacatgttacagtgatccaaaagcaaatcagtatgcttccattaaaactgattacaaatgtattaatgctaggcatttatatttcttttcatctttttcttgtttttacattttgcagatgtagcatttatatttctctgggatttcagaaatgtaagacaagtccattttttcactttcttaggctttaaccaaactaaacctacatgaaagccatctcttaaatgttaaaattctgagttgtcaactagatgactgtttggtctagtgattggaatttgctgtatattcagagaagcttcaaacccaccatactggccataatgttggagtttgcttttacaattaaactctacttgctatgtgctcttatgtcttttttttttttttaagttaaagcccaccttttaattttgtgtaatatgggtgtcctctcacaaaatgattttctttttaaatcccatttgcttgtgttatttaacacttttcttgttcctgctatgttaacattattaaaaccttcatgcctgtaatcccagcactttgggaggccaaagcggcagacatgaggtcagaagttcaagaccagcctggccaacatggtgaaaccccgtctctactaaaaatacaaaaaaaaaaaaaaaagtagctgggtgtggttgtgcatgcctgtaatcccagctactctggaggctgaagcaggagaattgcttaaacccagggggcagaggttgcagtgagccaagatcgcacccctgcactccagcctaggcaacagagaaagactccatctcgaaaaacaaaaacaaacaaacaaacaaaaactcatggactttcattattatttctttattatgtagggctatctagtgattttatctaccaggagatgagaaactattttttcttagttatcactctacttctacattctgctaatttatcaaatgtctgaaatgcataattgcaccctcttatatttgagatatcatcattagtgttaatcaattgctggatttctttttttacctgattcctacatgtgaccattggtgctaaacagttttttctattcctagtacagtactacttttggtactactggtttacttacagatccttggctatacagacagaaggaaatacatgactacattttataaacataagtataataagaaaaacaaaatacccatatataaactgtaaaaccaatataaattaacaattttctactcaatttgtattttttaaattagtagtacctttttatatccttcattttttcttttctagaaaaaagctaaccttcaacagtctcaaattattctatttagtcatactgattacttttttttcatgctcatattgccagagattacctagggagaagccatctaagttgctttccttatctagcttttgaaaacagccactaatttttttcttaggtgaattttgttttctcggcaacaaaatgattgtcccagaaacattgttttatgtctttcttcttttctttctttctttctttcttttccctttctctgataagtaaaggaccttgatttttattagcattatttattaatagatattagtcagcaagtatccagctgctaggactgaccaatatcagtgctagctgtcggcaaaaggactgttgctgctattggtgactgttgctgctattggtgtcttttagggagagatctggaaaagatgtttttaggtttatgaattcaccattgattattttctgtaacatatcatgttgctgcatctactgttattttattatgaagtttcaccagcttcaaagattctcctctacagtaacaagaaagttgctttgtaagcacaatatcaaaggaaggcaatttagaataagtagatttaggaagcaattcatctagaccagtggcaaatggaaccctgctagtccaagtgtcaagtgttacctgcaaaaggaaaataaaatgagaacaatgtcgtgaattttccaaatttagtttgttcactttattggtgttgctgtcttatgtgaaatgttagaatagcagtggcagagattttaatatttccctgttcaaaaaataaaatattttaaaattttatttcaaattgtgggtgaatgtattaactgtcagaattcaaaaaaggattgaacaaccaccttgaaaacatcatgtatgcctctggatctcaggaactgctggaaacaggaacaacatgacctacctatgacattttttaatttttcaagtaggcttagactggtcttgactacacaattaaatccatagcccctgtgatgacagtgttttgcatcttgcagtatgtatcaccagacagagactttttttcatttctgggatggggctttggtcaccaagtttggttaagatgtccatcttggaccgttcaccaaggagaaggagtttggctcatataagaatctggtagctccctttatagctagatggattgggtagggtggttccaattaaaaaggaggaatgctgtgaaaatctttttctagaagtttacaatgtctaagatgtcctcacttggtataataaaaaatggtagttatgtgctttgcattcatttatttcctttgttctgtccttcactgctttctaagtcttgttggttgtattggtttgccagggctgccataacaaaatactacagactgggtggcttaaacaacagaaatttgttttctcacagttctggaagctggaagtccaagatcaaggtgatggcaagtttggtttctcctgaggcctctctccttggcttgcaaatgacctatcttccctccctctgtgaattcacatggttcatcacatctctgtgtcttcatcactctctgtgtgtgctgtctgtgtcctaatctattcttataagaacaccagtcccattggagtgcccatccatatgagcttgtttaacctttattgtctctttcagggctctgtctccaaatgcagtcatattctaaggtactgggggttaggattttttataaattttggaaggatacaattaaatcccatgaattcaaaatccaagtgtaaaattatttaccccaattagaaattggataaattagtatcctttcactataaaatgtattttgactaatatattattaactaccaggttaagagtctctcatttggatagtgtgtttgataaacactcacatcagtgtcttcacaaaattctccctttaaaaagcttttccttttccacaacttcaattatgttttgttgttgttgttttaattttctgttttgcatttttagtacgacagcttatcttttgctgcctatattttctcatttttaaatgtatatagataagtagtttattcttattggactatcgctgacactgtatggaacagagcttccaataaacaagtgattttatttatagtttaagttattcattaccttcgtttggagaaagaagcacttagatttgggtatacttatcacctttcaaaccatggtatgtgcactattcatggatcccacgtgtttttaaagtttaataatgtttaatttgaattgttaaagaggtttatttaaaagccccagtgtccttacttttaaacccaaggactaaagtgttcactgtctatttgaaaatattattagctttccgtaatgaatactactttaactacaaattatgctaacattcgaattagctgaaaagtgacctgagatggcatgccaccatttagtatttaggctgtttttttgatgtctttgatgttctatttttctgtacatttgttatttcattgttagtctctaataagttcttacttttcttaatatacttatcacccatttatatatatacaaatatacaaatcaggactttattccttcttcagcaattcctgcctgtgcacttcagcacattaccatctcttctcaagacttctcagtgtagccttctagtttattttgctatttgccctcttgaaaataaaataggaaacataatctcagctctgatatattatggtataatgcaagtcaataattaattttaatcgaattaatatagattgttttcctgcccattcttcctgatgtaaaacaaataattggcaaatggtagccaaattttcacttccaagcatggtctaaattaatatttcacagttgtcacaatatacaaaatttgtttgaaaaacaattcattaaatgtgttagaagaatgttacctacatttgaaatataaatattagaaaaagtaactggagtttcatttcacagacttctatttgaaaaatgtgtatatactttttatgtgtttgcagtgagcaaattcctttttaatatcactaaagaagtttttattcaaataaacacttacctgtatttctcatatcaagaaatcatttcctgacttctaatatctttcatatctgcccatatgtacttccatttaattataagttacataaatatcattaaaaaagaaaaaaaatgaatgtgcagataattggaaaagttaagaggttttagaataagtcttggaattttttattggactgataattttaaagcccataggtgtcaaatgatttctgagactcagttaaaacttttcattctgatttggaattcatttttgcttcacggcttccacatatgagtatttcctcatttactcagtgttttggtttctaattgttggttttgatttttcttcaggatgttttgaataatttgggatcttgtgaactggatgaagatgatctaatgcttgatcttgaatttttagaggaacagagtcttcacccttctggtaagtgttaaagagatgaataatatcatacaaytcctaccctggtcagtagctttcactgatagcctaaacactgttaaggctgccttctatcttttcaggcctcagtttttatagtctatatgcaaaraacatgctaggtaccatggagacataatttgggtgcgttaaatgattttaaagccttttatggaaatataaatcctgttggaagataattataaataagaaaaactataaaaaaatctttccaaaataggaaatattctagttaaataattaacaaaaagtttaatattttcttctgttttgtggaagaaagcaataattataatctcacttttcatttattttatataaccaaatggaagttttgtggatctaagatttactgctccaaatcttagccacttcctacataggttaatgttgatgcaataaggttgatctcaaaagtactaattaccagtagcagtcacaaatgcacactcataaacatatacacacacatagagttagagaggaggtaaataagtttttgttgaatgacttgagggagcctgatatatttgtaatggcttaaatttatattaaagcataaaatattatgtctccaaattccagaattactctctttaaagttggttataggaattattggtcgtccattcaaatttagatatttgacagcaaaagtaaacatttacacttaatttttttgttgctaataatgtctttaacatagtcattttcaagtggatatagcattaaactaaagctttagaacgttgggacctactgcatacatttaagaaaatcagtctcttatatggtagtgtctttatttttaattcgtggaaattagacataacctctgtagttatttttagttgtaaaactttatgatgaattttcatttatgtagtatatttggataatagataatatcatattatcaattgtcaaaagaaggcaataacaatgttgatattttcttacactctattttaggctaataccaaacaagaaactgcatttaaaattttttcggttgaataccactttatgataaaaatttcttgggacatttttcctgtagttgatttgacagatatccttctaaaaatgtagattttcacacttttatgcagatggtttttacaacttagatccaacaacttaacttctagatatctaattctatgatactggcaaaagacaaaatagtacatgcatataattattcactgcaaaatatttataatggaaaaatattggaagcacctgaaatgctcatcaataggatacttgttgaatatacaatggtttaccgaacagtcattaaaaaggaggaggacagtatccaaatctgctatgrcattattgtaaggatatattatttgtttttgttttgttttgtttgaaacaaggtctggctctgttgcccaggctggagtccagtggcgtgatctcagctcaccacaacttccgcctcctgggctcaagtaaatctcccatctcagcctcccaagtagctgggactgcaaatgcatgccaccacatccaatttttgtattttagtagagacagggtttcaccatgttgcccaggctggtcttgaactcttaggctcaaaagatccacttgcctccgtctcccaaagtgcagggattacaagtttgagtcaccatggccacccgattgtaaggatgtattgttgatagagaacttttcttttcaaggatggattagatagggaataccaaaaccaaacccactgatcaattctctaacatcacaaaaagtgtaatgaatatatagtttgcccctcttgatgcaatgctgactgaagtacaacagcacaacctctgaagtgttcgtgtcctctcaccccttcctatccccgtcccagaagaaataatccattcaaatagttcaaactttgattttataggaattattggaatgggtggagggaaaatgttaaatgtcataaaaagattgtgggcaaccaaatataggatttggagattctgcaagataaatggtctggtttcttcaaaagataaatggcatgataaaataggaggagttggagttgtaggttaaaagaggcaaatgcaattgacattcttgttggtatacttatctgaaatatataaactttttctataaagttgtttctgagttaatcagagaaattagaggattgactgttactgcagaattatagttaattttattgggtgttgaaatggtattttgttttgtttagtttttttcaggaaaactttttatagagataaatgtggtggtaccaatatcgtatataggctttgctttaccaacaagtatgagtaaggaaatagatgaaacaaagtagacaaattcttaaaaattatcaaagccgggcaagagttgcatggggtgaaaagttcatgaattaattataatattctctctattttgtatattttttgaagattttcattgtaaaaaataaaacaaagcaacaattagaaaacactacagttaacatagcagtctcaattatgtttggtagtcaaccacaatgacgagaaaataatgatttaaatatctgaagacttatttcagtgtgtttacttggggacaaaatcaacctctttaaactttagtctctcctttacgaagtaataatggtactgtgtacttcattaatttattttaaataaaaatgaaataatttttacaatgaatctcttgagtctactttaaggtgtaggttgcttagttaaagctcaaaccagggtacctgatgaatcaactgagtcatataaattgttcacaagataaatggtattagtttgcatacatgaagtgcaattctaatagataaaatattacttagagtgactttggattgtttaatgtcacttaataaactgtcttttgaaaatctatttcattttagatgccatgttgtgtggtttttaaaaagcagcaaacacgtttatatactttagctgagaaagaattatttccagttgaattggttttatacaatttattttatttattaagcaacataattaaagacctcagattaggccgggcgcggtggctcacgcctgtaatcccagcactttgggaggctgaggcgggtggatcacgaggtcaggagatcgagaccatcccggctaaaacggtgaaaccccgtctctactaaaaatacaaaaaattagccgggcgtagtggcgggcgcctgtagtcccagctacttgggaggctgaggcaggagaatggcgtgaacccgggaggcggagcttgcagtgagccragatcccgccactgcactccagcctgggcgacagagcgagactccgtctcaaaaaaaaaaaaaaaaaaaaaagaaaaaagacctcagattataagaagcttatgattgataattgatattgataaaaatcacagcattaaacattcaaaaatgatgtttttaataaaagaacagcgattttcaaaagtctgaaaagtgaaataatgatatcattatattccactgcttatattactgaaaatcattaaaggggttgaaaaaatacttcttaaagacaatgcatatgaatttttggctacagagtcttattatggtagtttatagtagggcttactataatggccaagattgactttttaaaagaccacagaagacaagattaagattgcagatgggaggaaggactagcttgtagctcctgcttggatgaacagagcagggtgtggagactcacatcatgaacttttgctccaagaactaccgcaggaacataccaggaaagccaagagaatccacagacctttgaaggaattggatcaccgccacaggctccctgagatggcaaaaaactgtgagtctgcttgctttctcaatgggaggctcgtggtccggggcaagttctcagttctggtcactggctgcttggaaaatagactcagtgctgttgtgggacacgatgggagtgagataggcccttaagaccgtgggctgcatgggagtggggtgaggcatgtgactgacagctttccccagcttccctggcaaattatatgactcagcagaggcagccataatccccctgggaatataactccactggtctgggaaccacacccccattccccacaaaagtcacagcaagacccgctgcccaaggagaggctgagctcagaaatgcctatccctacccccacctggtggtctttctctaccctccctggtggcctaagacaaaggttataatctcttgggtgttctatggcccttcccacggcctgagaaacctgaatacttaaccaagtgtccctagggcaagtttgcatcctctctatagaactgcagctgatgccttcttgaaagtgttacttcctggctggaggctgaccaacacaaaaccagtgcactaaacaaaaacacaaccaaggaccatcacagagtccacttcactcccctgctacctccaccagagcaggtgctagtatccaggtctgaaagacctgaasatggatctcatcacaggactctgcaggctcagcccagaaccagcccagagcccagtagctctgctggttggctagacctggatgggcaaaaacaatcactgcagttcggctctcaggaagtcccattcctaggggaagggggagagtaccacatcaagggagcactctgtgggacaaaagaatctgaatagcagtccatgagtctcagatcttccctctgacacagtctactcaaatgagaaggaaccagagaaacaattctagtaatatgaaaaaacaatattctttaacgttcccaaaagaccataccagctcaccagcagtggatccaaaccaaaaggaaatctctgaattgccgtaaaaagaattagaaggtcgattattaagctaatgaaggaggcaccagagaaaggtgaagtccaacttaaagaaataaaaaacatgatacaggatatgaaaggaaaaatcttcaatgaaatagatagcataaataaaaaataatcacaacttctggaaatgaaggacacacagaaatgcaaaatgccctggaaagcttcagcaatagaatcaaacaagcagaagaaagaacttcagagctcaaagacaaggctttcaaattaacccaattcattaaagacaaagaaaaaataactaaaaaataaaaataaatcctccaagaagtttggcactgtgttaaatgtccaaacctgtgaataattggtgttcctggggcagaagagatatctaaaagtttggaaaacgtatttgatggaataactgaggaaaacttccccagccttgttagagacctatacatctaaattcaagaagctcaaagaacaccttggaaattcatcacaaaaacatcatgacctacgcacacagtcatcaggttacctaaagtcaagatgaatgaaataattttaagagctgtgaggcaaaagcatcagggaacttataaatgaaaacctatcagattaacagcagatttctcagcagaaaccttacaagctagaagggattgggttctatttttagccttcttaaacaaaacaattatcagacaagaattttgtttccagcaaaactaagcttcataaatgaaggaaagataaagtcttttccagacaaataaacactgaaataattcgccactaccaagccagcactacaggaactgccaaaaggagctctaaatcttgaaacaaattttcaaaatacaccaaaagagaaactccttaaagcataaatctcactgaacctatataacagtaacaaaatgaaaaaaaaaagtatgcaggcaacaaatagcatgatgaatagaatagtacctcatgtctcaatattaacattgaatgtaaatagcctaaatgctccactgaaaagagacagaatggcagaatgggtaataattcactaaacaagtttgttctgttttcaggaaactcacctaacacgtaagaattcacatgaacttaagataaaggggtggaaaaagatattccatgcaaatggacaacaaaattgagcaggagtagctattattataccagacaaagcaaactttaaagcaacagcagttaaaaaaggcaaagagggacactatataatgataagagtagtccaataggaaaatattgcagttctaaatatatatgcacctaacactggagctcccaaatttagaaaacaattacaattagacctaagaaatgagatagatggcaacacaataatggtgggggacttcaatacttcactgacagcactaggcaggtcatcaagacagaaagtcagcaaagaaacaatggacttaactataccctacaacaaatagacttaacagatatttacagaacattctacccaacaactgcagaatatatgttgtattcatcagcacatggaacgttctccaagaccataagacaggccactaaacaagtctcagtaaatttaaggaaatcgaaattatatcaaatattccttcagagcacagtggaataaaattggaaatcaactccaaaaggaatcttcaaaaccatgcaaatacatggaaattaaataacctgcttctgcatgatcattgggtgactaataatatcaagatggaacttaaaaaattatttgaactgaatgataatagtgataaaacctatcaaaacctctgggatatagtaaaagcagtgctaagaggaaagttcatagaattaaatgcctacatcaaaaattctgaaatagcacaaatgggcaatctaagctcacacctcacggaactggagaaacaagaacaaaccaaacacacacccagcagaagaaaataaataatgaaattcagagcagaactaaatgaaactgaaacaacaacaacaaaaaagacaaaagataagtgaatcaaaaagctttttcttcgaaaaaaataaataaaattgatagaccattagcgagattaacctagaaaagaagagagaaaatccaaataatctcaattagaaacaaaatgggaggcattacaactgataccacagaaatataaaagattattcaaagctaccatgaacacctttacacacataaactagtggagatggataaattcctggaaatatatgaccctcgtagattaaaccaggaggatataaaatctctgaacagaccaataataagcagcaagcttgaaatgataatttaaaaactgtcaacaaaaaaagtttaggaccagatggattcacaactgaattctatcagacattcaaagaagaattggtcccaatcctgttgacactattctgaaagatagagaaagagggaatcctccttaaatcattctatgaagccagtatcaccctgataccaaaaccagggaaagacataacaaaagaaaactacagacaaatatccctgatgaacatagatgcaaaaattctcagaaaaatactagcaaactaaatccagcatcatatcaaaaagatgatccagaggtggagccaagatggccgaataggaacagctgcagtctacagctcccagcgtgagcgacgcagaagacgggtgatttctgcatttccaactgaggtactgggttcatctcacgggggagtgctggacagtgggtgcaggacagtgggtgtggcgcascctacatgagccgaagcagggtgaggcattacctcacctgggaagtgcaaggggtcagggaattccctttcctagtcaaagaaaggggtgacagacggcatctggaaaatcgggtcactcctaccctaatactgcacttttccaacgggcctaacaaacggcacaccaggagattatatcccgcgcatggctcagagggtcctacgtccacggagcctcactcattgctagcacagcagtctaagatcaaactgcaaggcagcagcaaggctgggggaggggcacccgccattgcccaggcttgagtagctaaacagagcggctgggaagctcgaactaggtagagtccacccagctcaaggaggcctgcctgcctctgtaggctccacctatgggggcagggcacagacaaacaaaagacagcaataacctctgcagacttaaatgtccttgtctgacagctttgaagagagtagtgattctcccagcacgcagcttgagatctgagaatgggcagactgcctcctcaagtgggtccctgacccccgagtagcctaactgggaggcatcccccagtaggggaggactgacacctcacacggccggatactcctctgagacaaaacttccagaggaacgattaagcagcagcatttgcggttcaccaatatccactgttctgcagccaccactgctgataccgaggcaaacagggtctggagtggacctccagtaaactccaacagatctgcagctgagtgtcctgactgctagaaggaaaactaaccaacagaaaggacatccacaccaacaacccatctgtacgtcaccatcatcaaagaccaaaggtagataaaaccacaaagataggggaaaaatagaacagaaaaaccagaaatctaaaaatcagagcacctctcctcctccaaaggaatgcagctcctcaccagcaacggaacaaagctggacggacaatgactttgatgagttgagagaagaaggcttcagaagatcaaactactccaagctaaaggaggaagttcgaacaaatggcaaagaagttaaaaactgaaaacaaattagatgaatggataactggaataaccaatgcagagaagtccttaaaggacctcatggagctgaaaaccacagcaggagaactacgtgatgaatgcacaagcctcagtaactgatgcgatcaactggaagaaagggtatcagtgatggaagacaaaatgaatgaaataaagtgagaagagaagtttagagaaaaaagaataaaaagaaacaaacaaagcctccaagaaatatgggactatgtgaaaagaccaaatctacatctaattggtgtacctgaaagtgacagggagaatggaaccaagttggaaaacactctgcaggatattatccaggacaacttccccaatctagcaaggcaggccaacattcaaattcaggaaatacagagaacgccacaaagataatcctcgagaagagcaactccaagaaacataattgtcagattcaccaaagtggaaatgaaggaaaaaatgttaagggcagccagagagaaaggtcgggttacccacaaagggaagcccatcagactaaaagctgatctctcggcagaaactctacaagccagaagagagtgggggccaatattcaacattcttaaagaaaagaattttcaacccagaatttaatatccagccaaactaagcttcataagtgaaggagaaataaaatcctttacatacaagcaaatgctgagagattttgtcaccaccagacctgccctaaaagtgctcctgaaggaagcactaaacatggaaaggaacaactggtaccagccactgcaaaaacatgctaaattttaaagaccatcaaggctaggaagaaactgcatcaactaaagagcaaaataagcagctaacatcataatgacaggatcaaattcacacataacaatactaaccttaaatgtaaatgggctaaatgctgcaattaaaaggcacagactagcaaatcagataaagagttaagacccatctgtgtgctgtattcaggaaacccatctcatgtgcagagacacacataggctcaaaataaagggatggaggaagatctaccaagcaaatggaaaacaaaaaaaggcaggggttgcaatcctagtctcggataaaacagactttaaaccaacaaagatcaaaagggacaaagaaggccattacataatggtaaagggatcaattcaacaagaagaggtaattatcctaaatatgcatgcacccattacaggagcacccagattcataaagcaagtacttagtgacctacaaagagacatagattcccacacaataataatgggagacattaacaccccactgtcaacattagacagatcaatgagacagaaagttagcaaggatatccagcaattgaactcagctctgcaccaagtggacctaatagtcatctgcagaactctccaccccaaatcaacagaatatacattcttttcagcaccacaccacacctattccaaaactgaccacatagttggaagtaaagcactcctcagcaaatgtaaaagaacagaaagtataacaaactgtctctccgaccacagtgcaatccaactagaactcagcactaagaaactcactcaaaaccgctcaagtacatggaaactgaacaacctgttctgaatgactactgggtacataatgaaatgaagcagaaataaagatgttctttgaaaccaacgagaacaaagacacaacatacgagcatctctgggacacattcaaagcagtgtgtagagggaaatttatagcactaaatgcccacaagagaaagcaggaaatatctaaaattgacaccctaacatcacaattaactagagaagcaagagcaaacacattcaacagctaggagaaggcaagaaataactaagatcagagaagagctgaaggaaatagagacacaaaaaacccttcaaaaaatcaatgaatccaggagctggtttttcgaaaggatcaacaaaattgatagaccactagcaagactaataaagaagcaragagagaagaatcaaatagacacaataaaaaatgacaaagaggatatcaccactgatcccacagaaatacaaaccagcatcagagaatactataaacacctctacacaaataaactagaaaatctagaagaaatggataaattcctggacacatacacctcctaaggctaaaccaggaagaagttgaatcactgaatagaccaataataggctctgaaattgaggcaataattaatagcctaccaaccaaaaaaagtccaggaccagatggattcacagccgaattctaccagaggtacaaggaggagctggtaccattccttctgaaactattccaatcaatagaaaaagagggaatcctccctaactcattttatgaggccagcatcatcctgataccaaagcctggcagagacacaacaaaaaaagagaatttgagaccaatatccctgatgaacactgatgcaaaaatcctcaataaaatactggcaaactgaatccagcaacacatcaaaatcttatccaccacgatcacatgggcttcatccctgggatgcaaggctggttcaacatacgaaaatcaataaacgtaatccagcatataaacagaaccaaagacaaaaaccacatgattatctcaatagatgcagaaaaggcctttgacaaaattcaacaacacttcgtgctaaaaactcaataaattaggtattgatgggatgtatctcaaaataacatgagctatctatgacaaacccacagccaatatcatactgaatggacaaaaactggaagcattccctttgaaaactggcacaagacagggatgccctctctcaccactcctattcaacatagtgttggcagttctggccagggcaatcaggcaggggaaggaaatagcgggcattcaattaggaaaagaggcagtcaaattgtccctgtttgcagataacatgattgtacatctagaaaaccccattgtctcagcccaaaatctccttaagctgataagcaacttcagcaaagtctcaggatacaaaatcaatgtgcaaaaatcacaggcattcttatacaccaaaggattataaatcatgctgctataaagacacatgcacacgtatgtttattgcggcactattcacaatagcaaagactttgaaccaagccaaatgtccaacaatgatagactggattaagaaaatgtggcacatatataccatggaatactatgcagccttaagaaaggatgagttcatatcctttgtarggacatggatgaagctggaaaccakcattctcaggaaactattgcaaggacaaaaaaaccaaacaccgcatgttctcactcataggtgggaactgaacaatgagaacacatggacacaggaagaggaacctcacacactgaggactgttgtggggtggggggaggggggagggatagcatagggagatatacctaatgctacatgacgagttgatgggtgcagcacaccaacatggcacaggtatacatatgtaacaaacttacacgttgtgcatgtgtaccctaaaacttaaagtataataataataaaaaaaagaattttgaatgttaaaaaaagatgctgaatcataaatataaacatcaaaaaaaaaaaaaccaaaaagataatccatgatgatcaagtggttttcatacgagggatgcagggatggtttaacagatgtaagtcaataaaagtgacacacaagcaaaacagaattaaaaacasatatcacatgatcatctcaatagaattagaaaaagcctttgacaaaatccagcattgctttatgattaaaatcgtcagcaaaatcggcatagaagggacataccttaaggtaataaaagccatctatgacagacccacagacaacatcatactgaatggggaaaagttgaaagcattctccctgagaactggaacaagacaaagatgctcacttttactactactattcaacatggtactggaagtcctagccagagccatcagacaagagaaagaaataaagagcatccaaatcagtaaagaggaagtcaagctgtcagaaataaagagcatccaaatcagtaaagaggaagtcaagctgtcactgtttgctgaagacatgatcatatacctagaaaaccctaaagactcattcaaaaacctcctggtaaatgaatttagcaaagtttcaggataccaaattaatgtacacaaatcagtagcccttctatacaccaacagttaccaacctgagaatcaaatgaagaacacaacccctttcacaatagctgcaaaaacataaagtaaaatacttaggaatatacctaaccaaggacatgaaagacctctacaaggtaaactacaaacagtgctgaaagaaattatcagtgacacaaacaaatggaaacacatcctatgctcgtggatgggtagaaccattatcgtgaaaaaaaccatactgctataagcaatctacaaattcagtgcaattcccttcaaaacactaccattattctttgcagaactagaaagaaaaaaccctaaaattcatatggaaccataaaagagctcacatagccaaagcaagactaagcaaacaaatctggaggcacattacccaacttcaaattataaggccatagtcaccaaaacagcatggtactggtataaaaatgatacggggtgtgaatgtttagtttttgctgattgtattgaataatttgaatagtttcataaatccttgtaataaagagtcctaaattaatatatgttcctccctcacgcctgtaatcccagcactttgggaggccaaggcgggcagatcacgaggtcaggmgatcaagaccacggtgaaaccccgtctccactaaaaatacaaaaaaaaaaaattagccgcgcgtagtggcgggcgcctgtagttccagctactcgggaggctgaggcaggagaatggcgtgaacccgggaggtggagcttgcagtgagccaagattgcgccactgcaccccagcctgggtgacagagcgagacaccgtctcaaaaaaaaaaaaaaaaaaaaaaaaaaaaaaaatatatatatatatatatatatatatatatcttcttcctaaaaggagcagtagtacaaataatgatagaaataaaatatgttttatagtgcagtaagtggatattattatttttatgaaagccaggaagaacaatttcaatgaaagaatggtatatgaattcaaagtgagttcctaaaaggagatagccttgagaggaaaaaaatttaaaaataaaattaaaaatttcaataatttaccatgatcttggcattatctaattttattgttttaaattctaatataaaggctaaggttttcaatttaaaaggttttagatttaaaggatttttttattatattttcttgagtttctgaaaaatgttttctggaaaccattttttgtgaaataatacacattatgtttcaaacacaggattataagttttttactaccagacatttctattttcttgtggtaaaatattacatttattgtttctcctttaaataaataatttataaagcatatatgatcaagcacagggattttatgttagaaaatatgagatgctagcatttatactttgataaactaaaaagtatattagtgacccttcacactttttatctgtcctcactttcttattcatgtttgtatagtattgtttttgtcacaaattgagtcatgcaatatgttagcagcgaggttcgttagataaacctcagcatatttttttaaaaaggggttttaatgatatttactagcatttaatatttcaaagacttgaccttgaaatattcaaggtcaatatttcaaataagttcccttgaagttttcttcacagtgaagtatatgttatgaactatacaatttgtctaaggaaaaataccagcaatacatttttgtttgtttttctttatgtagtttcacatttgttttgaggatatttttctattcacttatgcatcttgcaaaatatttataacacagataaaataataatcatttaaggaaaacaaagtaaccaggatatgaaaaaaaataagatgaggctatggataaggttaaggcacaaaaagtttactagtgttatgacggtgaattgaaaatgttattttgagtgtcctattagcatgtatgargaaagaaaatcagttgaaaaatcaaaatatatatcatcaatcattcaatcagtgaatgtattttcttaaataaaataattcttgttcctaagaactgaaatgtattttgctcacatgtcttcataaggtgcacatratttgaatcgggaataatttgcttagcaacccccttcagtacaagctgagacatcatgctgccagttcagtattaacagttctaaacggtgccacgtcagtgtggcaaaagcttggagccttataaggaacgtacttaattcaaaataaaatcgattaactttttttatactttgtattcctcaaataatttcaatatggaaattaggtaaagtaaatattgtcaagaattttagtcagacagaaagtaattaccataaagcttaataaartatcagatattaagcaatgttatttcctgatgaatcctctgaaatgagctgttgatgaaagataaccactgggtaacaaataagacaattttgcaaatggctgttatcaaataactggttaaatattaagcaatgcatattctaaataagaatttgggtttgtgttttggaatacttaatctttagctatttaatccatggtaaactaaaacaaggtcctgtttctatttcggctactcataggattatcttcgtagtggcagaagctgatgggaaatatgcacctgggtaatgagagtgatgcatcataattaaatgaattaaagttaaaagagggctaaaacacattttagtgttacccatttggagtatattacttacaatactgtttctttaattcttaccctgacttctgtgttagtactggggtaggttgtacataatcattggcaatttatagctggagatctcagttgatgggagtagaactagcagtggcttcagggtagggaaatggagagatgatcaaaagatacaaactttcagttgtaagatgagcacattctgaggatctaatatacagcatgaatggtgagggatgtgttaattaatttgtggctatcactgcacaatatgtacgtatatcaaatcattaccttttttttaccttgactatattcaatcttatttatcaattaaatattttaaaattcataaagttaaaaataggttgatggaaaggaaaattgaatgcctataatgagccagtctctttttgtaaaccctctcaacttaatcctcacaataactctgagagaaaattgcaccttaatgattcattcaaaataaagaaactacaaattaatatcaaaagagagcaggcattttaaagataggcatatccaagttagaattccagctctgcccacagttgctttcaacaaatgatatttctgagctcagtttcctcatttgtaaaatgacaataattatgtctgtctcaaaatataatcctatctaaatgagtgacatgcaaagttctattctcagttgcccaaaatagggtaagagcccagtacaagttggttaccattcttgaaattttagacagttttaattccttgttaaagacgttgtcccattattggttattttttgtagaccctagtttcttaatgttttatcattattataaattattttaaaatgtgctttctgatttaaatgttattatctaaattttatgtaacattttaagtgataatttactagtactaaatattcaaaaatcaaataggacactttgcttataataggtggtatatttctttgtgttaaaaccagtgcatttaccataaaaaagaatgagttcatgttctttgcagggacatggatgaagctgaaaaccattattcttagcaaacttaacacaggaacagaaaaccaaacaccacatgttctcacttataagtgggagctgaacaatgagaacacgtggacacacgcaggggaayatcacacaccagggcctgtcagtgggttgggggcaagaggagggagagaattaggacaaatacctaatgcattcagggcttaaaacctagatgacgggttgataggtgcagcaaaccaccatggcacatgtgtgcctatgtaacaaacctgcaccttctgcacatgtatccctgaacttaaagtataataaatataaaaaaaatttaaaaaaaccaatgcatttaaatgcatgaactttttttctggttgttagtcaaatgtccaaattgccatagcatatttaaaatagaaatttatttgaaaaagaataaatttctattttaaataccttaaaaattattaaccattaatattaaccattaatcattaatactcaaagagaaattatggctgttactttgtattaaggttgatatttacaatttgcagaagagtttttaaattaaattaaaaatatatcttacttatttaatgtttttggataaaaagaatgtaatggtcatttggatgatagaatgaagatattttatgttgttttggttatttatttagtatattagatctgaaaacacctagggcagtgtctcttggtatatatccaaaggaaaatggggaagtaatggcccaatgatatcaatgaggaattaattgcgtagttgctaaattattttgagtttgatgaacaagcaatataaaaattctgcagtgagttaggaactcctcctgtgcctattaattagggagataatttttgttattaatttttaatgaataatagtacagcagagcagagatgaaaccctagtggttttcctaatacgaatggtaatgtacagagaattgcaacaacattcacacagggaaaattatagaaatcaactataaatttctacaagctctgatgtgtcttggtcagaaaaagtgtgtctaaagtatttttaatctgattatataaaactaagaaacatacagcacttaatttttgaagtataacataatggttaaaaatatggatgctggctctggaattagacaaatctcaaccaccagccaggctatgtaaacttgagcaagttatttaatcttttgcagcttttcttcttcatctgaaaatgggcgcgatgatgtatctacctcataaatttgatggagaaacaataagttaaagctttgtagaatatgcaatctcatgtccagcatatatatttttaagaactactgctaataccattttaaaaatatgcatgtaaaatgtgatatacctgtatgtaggccaatcagcatctgattctgacagatttagtgatctttccagtctctattagtggaaaatcttaacatttttaaatatagaatttctcaaattttaagtatagaatgccacagcacatgcaactaatttttatcatttatttctaagcttataaaattatagcactaaataaaataatgggataataaataatatttattgagtctaggtgccaatttatgaggtaaataacatcactttctcatttgagaaagttggagctttgagtgataaagcattataggaataaatatcccagctagactcaaacatggtatttctgactctgaggctctgtaattagccattttgattctgttgactaataaaattaattcatgtaaaatgttaaaatcacatgttcactgaagcatttgttttaaactgaccttctgttctaatagctttttaagttatgggcatcacttaatatatatttgtctttgacttcacctaagaagttggaattaactatgtttatttattgaagcatatacattgtgctgaccactggcctgggcactttgttgtttcaggttttgctttagttttaagctataatttctaagcattttggattatctaatttaatcctcacagcaattctcagaaagtgttatcattctctcttcatagatgaaggaagagaaacccagaagagcactgttatttgtgcatgattacagagctattcttgggtttcaattatgcctatgtggctttgatacccacttactgtttccactataaaagctctcaatgatgtttagttactagaaggagcagttataatagcgtttccaaattttctattacactacaattttgataacactttagtgaggatgaaattgtgatctcagttgtcactttgtgtgtttcatcagcagatcctattactctgyatttctacttcaaaagggatacratacctgttatctgcttggttgccattagatggcaatcttgttcttctaacgatgatagtaatcctgtcatacatttgtattcagctttatagtttacaagctatttcaaatatgttatctcatcaaattatcacagtaacactctgaaatagatgttaatatacatcaagtacagtggagggagcaaatactctggttaaagaacttattcagccagtattaacctagatcttaacattaaatggcagkttcttttaactgtttttctagaccttgatgcttctaattttatgtacagttctaatatacttggttatatgttttccaaggcactgaaaatcataataacatcttagaagaggagagagaagaggagagagaagcagcagggratgaagtattrctgtattacaatgtggcacaccattactttttaaaaactattattgtagttcttaatcatcaagaaaaaatacattctgcattattctgagatggagagctgtataattcactttggaaatatatctaaactcttatttattctttaatttattgaatgaaaataaaccctcagttcttcatatgctttaactatccaggaagtgtcattttataatgattccccatggcaaaaatgtgaatataccttaaactttttatatgttttttatgtttttccccatattctttccccaggttcttgcaaaagactacttagatataaggatagctgtgcgaaaggctttcctaattgtcgtacttgaaaaagcagtaatttatagtctactaattgagtatggggaccatgatattccttaaacacaagactatataattatcgataatacatttttagtgtagatatttcaaaatttaatattttttattagctgtttttgctcgaccaatttacaaattgaccaattgattaattcattagtttgatacattcttttacactcccattaaaaaatattgaacttattaattaaaatagtaacattcacctgggtgcactcttttcatactctgtgttaaatgatgtacttaagtgacagaataatgttctaactgggagagaattttagaagtagaagctcctcctacttcttctcctatgaatattaatagttttaaatgttttgttcagggtcacatagtttgcttgtaataaagagatgactcttaagtaagaaattgactagctccatgtagtaagatggcaattatttgatttttatggtagttgccaacagactaaatcatttgcatttcctgatttaaaagtgcttctgcctatctattttgcctttcagactttgctatatttttaagaggattgcttcagtgacaaagaaggcttttagatggaacagttttctaaatccaatcaacagtagctgaaaaatgtttatacatcctgacctaatttagtattaaataacaacaattttaatgaagtcatagtatttacttgtaacctgctattgtagcatttcctactgacataaactctcttctgctgcacaaaagggcagtcaatggcccaagttcattagaggatacagtcaaaagaaaagatktatttcattcggcatggtttttctggtgcaattagaaaagaaaatatgtgtctcaatataaaatttcatggcctcttacaattatgtggtgacatctccatacaattgcttgaataatgccaggaacatcagctgtcactatcaaaatgaacaagwaattaagaaagcaaacgctggtctttcttctaaaggaatagaatatttatgtatttaaagttgttcaccaacaagaaaaataaccactgacatgaaacataatttcctatcgtgcctgaggcagaaaagagaaataataatgaagattcacacaattacaacaaattaggttgyaattgtgcatactaaaaacaattatagactttctattcatcaggtcatatgatagcatcttatctcttttatttattttctgatactytatcttattaatcacattttctaaaagcttatgatggaattgggaaactcttactcttatcaagaccacattttctgtacccttacatcataacgtgctagcataacctaaagtaggctaagccttgtctggatagtagaatgatagtagatctgattgaagccataatagtgttaaatgctggctcttcaaccttttgataagacagtgttcagtttattgtttactgaggtaagggaaaaacgctaccttgactgaattctggtagttttctgtagaggaaagtacaagataggatttactgagagtatgaatgtggtttaaggcagatgtttcaattgaagggtttgtttgaattggataaaaataatgatttttttatccttatatctatgtagtcttttgcaagaacctggggaaagaatatggggaaaaacataaaaagcatataaaaagtttagagttgtaggattggcggaaacagtgaggggaggattttaacatgaagaatttaatgactcttaggggttgaactctctgttgatgctttttattgaaaaattggtgggtctttggggacagtcagtggtgtaaaatgttttggaattgttagggtacaccaaaaagacaataaaataggaaagtgatgttaaagtagacagtctgctgtttgtgggttggtggttttgggcctcagtctccctactgagggagggagaaggatagaacatttttaactaaaggcataatcaatccagattttcactaatgtttgaggtgttacaatcacatatcagatttctagggctcattatctcaaatgtccatgaaagtcagttttttcctcttgaatgacctttttctttgttggagaacttgacagggcagcagatgtgcaaagtcatttaagactctggaaatcacatctctgaacacaacaacacaaatagaaggattattatcagggtttgtgtccactccttggccagtggccaagagtgctcaattcaacaacggaataaatttcatccctattctgaagagcccataraaccagacacatgatcctccagcactttgggaggctaggctggaaaattgcttgagcctaggagttcaagactagcctagacaatatagagagaccctcatctttacaaaacataaaagaaattatccaagcatggtggcatgcacctgtagtcccagccagttgggaggctggggtgggaggatcgcttacacccaggaagttgaggctgctgtgagtcatgattgcaccactgcactccagcctgggcaacagagtgagtctctctctctctctctttctataagatcaatgtcaagtcatagagaccctgtttcgaaaacagaaaaaaaaacaccaaacgaacaaacaaaaaaacaccagatatgggattcttaaccaaattacctaattttctgctatgtttatttttaggcaggcgactttgggtaacattacagaagcatcttcaggctgtgtctcaaatggatattcgggataaggtttagatggaaagaaatctctcatgaactaaaatattttcaaactttgtcccaagtgcagtacactctcaacagcctcaaaatgacagggtaaacaggagcattactgagagatggattaaatcagcttatcgttgtaaattcttccatattcgataatgatgacttgggaagtctcttttgttttctccttgtgagattttgtctacttattgaacatcagtatatgcactgaaagatctagtttttttcacatatcttggcatcaatagtaacttgggcctgctcccatatgtagagcattcatagatcagaaaataattaaaatatatattatttggtgtaaataatgataaaaatattgaatgaaaatggaaataaaaattatcaattttaccaggtggttctttttatttatttatttatatttatttattttgagatggagtcttgctctattgccaggctagagtgcagtggcgtcatctcggctcactgcaaccttcacctcctgggttcaaacgattcccctgcctcagcctcctgagtagctgggactacaggcgcgtgccaccatgcccgaataattttttgtagtttagtagagacagggtttcaccatgttggccaggatggtctcaatctcctgatgtcgtgatctgcctgccttggcctcccaaagtgcggggaatacaggtgtgagccaccgcttctggctccaccaggtgattcattttctttttttattaacctccgcctcctgagtttaagtgattcttctgcctcagccccctgagtagctgggattacaggcaagagccactatgcccggctaacttgtttgtatttttagtagagacgggattttaccatgttgcccaggctggtcttgaactcctaacctcaggtgatccgcctgcatcccgcttcccaaaacgctcaaacaaccacccaacccccatcaaaccacctcccacacacctaccatacaccagccccttcaccccaacaaaaccataccccccacccccagcccaacctatcgaccccacaaccccacaaacgnnnnnnnnnnnnnnnnnnnntggcggaagttgaagatatttatttcaggggggtttgtgttttattaaacccttttccggatttcaattgaggcacaggcctgaagaggtttttgttaggttcctaaattcgcttgcctaacataaggataggcggaagattaggtaattggttaagaatcccatatttggggtttttggtttgttcgtttggtgttttttttctgttttcgagacagggtgtcttggactggacattgatcttatagaaagagagagagagagagactcactcttttgcccaggctggagtgcagtggtgtaatcatgactcacagcagcttcaacttcctgggtgtaagcgatcctcccaccccagcctcccaactggttgggactacaggtgcatgccaccatgcttggataatttcttttatgttttgtcaacactttgggaggtcaaggtgggcggatcaccgggtcaggagatcgaaaccatggtgaaaccttgtctctactaaaaatacaaaaaattagctgggcacagtggcgggcgcctgtagtaccagctactcgggaggctgaggcaggagaatggcgtgaacccgggaggctgaggttgcagtgagcagagattgcgccactgcgctccagcctgggtgacagagcaagtctctgtctcaaaaaaaaaaaaaagaaaaattcacagtattttattttttacatctatgatattgatgtgttaataaggtgttttagcattgattagcaacttttttttctttaaagaggtacataaaatgtgcgtcttgcaagtaatgctgtcttagttccaaaaatatattttagataagaaatacaggaatctgaaaaatccataggggtgatttattaattcatgtatcattgccttcagatcttgtccatataaagaattgtgaacagcctccatttctcattatacatccttaatagaatcatgtttgcttttttgttttattttcaaaggtaaaatatgtatcatcctcagtataccgctaactataatactcatatttctttacatgcatacatgaattatatggcaaactttattgttttatgcctatagatgcatttatatatgtagattttgtccaatccctacttactatgatcttcactattctcacatataagatactacacttgagagaagctttgattactaagaattacattactcatagtctacatttttatacccctgtgaaactagaagaagccagcttcaaccatcccttagaatgattgtctccaaagtctacttccagttcagtcctctttcctgatgtgcacatacatgtatttcatggcctgctagcaattttatcggatgtcaattatatgcatcagatttaacagatccaagattaactttattcttcctgcccataactttgtttttgcttcatatttatttcctcttttgtgaatagcaccaacatcagtgctgacttcaaaatttgaaaccaggtgtcactagttttaacggattctactttttacctgttcttaattctcacatttctttttataatttttgttttagtctttattcaggccatcgttttcctctaactaactttatgtgatccagttggtcttttacggcccttggtctggcatcagtgtccattagtgccatctttgttgttttttgttttgttttgtttcttcctctcattcttcatacagaactcagagcccctctcagattttatcttttaacccactctataaaaactttctatcatataaacactttcatgattagtatttatttcattttagattttggagtgatagggaggaatcacctggtgcaggtaagagcacagcagttgaaaatgcatgaaggagagagagagagagagaggaagagagagacagagagtattcaagagtttcattttgttatctcttctggactttactcagtttcttccttgtagccatgttcttttccaaattttgagcactttgaattcttgcttttcttaattcaagcaatgtacatctatagtcaactttcagagctaagtgtagactgactcaatgagcccaaaggcacagtctccgccatcaaaaatagcttagcagagaattttctcaacaaaagcaggtctttcccaaatggattttcataacagctgccagagtaataatctagcctctatctccagtttgacctcttatcatccattctctgtattgtccacaaggtgtgctgacccaccaaactgatcttgatcattaacctatttaaaagtcaatattacccattactttcattataaaatctgattttgttggcagagcttacaaagttctcaagcttcaacaccaccactttttctacacactaaacttgacttccagcaaatatttattgaagatttactgtaggccctaggattctagtaacaaatawagctgtgcagcatacagtctaatggaagattctattttttttwwwaaaaaaacgttaatgaagaaaagagcagtatgcaggacatagcagttttggtggtaagaaaagacatcctagagaagtgacgtttttccatgaaggataagtgggtattgataaagtggcatggtgccagagatggtttagaaacttggaactcttcgtggaaagtgcgatacatggtaggacttcacagaggcccaacattccttggcagagtagggagtcagtggcatcagatgaatgacgaatgcagcacattctttctcatctataaaatatttcaagtgctgatttcttaccctgaaatgatctctcttcatttacagttatatcactattcaactaacaaaatagagctgatactcattgatttatttgaagtattaatatttgtccatgaggaagaaagtataatactaggcaatgatgatcagggctaaaataatgtattatattcaggggaaagagatatttctgtgggccgcattaggtgggataggccttagaaggggttgtacttgaactatagtttaataaattgcaatagaggttgggggagtggtgacatattttatgagcaggaatcaatatagggaaaagactgaaggaaaaattccccaagtgtagctgaaaaacaatagaaggtggtaccaacctttaaaagccgagatttcttaggaatcatgtataaaaatttaaatttcataattctttgtctgttttttcttaaatagaaacaaaatacagctttgtttataacttgtgatatgaaataaaatactgagtatgtaaatatttgaataattaaagagtttgttcttcacaattatatgactctattctctatatcagtaaaagccatcatcaagttattaaacagaagtgatagctctatgaattgggagctggcaatatgcttttctaaataatgctctactttatttctactagaataggcttcaagttgttctgaaccattttctcaatgaaaatactgaacaaaacttctagatgattcttctaaaaagtctttaaaaatgtgtgtttataggataagaaaatgatatatctgcaggaaatgaaaataaatgttaaataggaatccttaaaagtaaatacttatcaaagacagcttcctttctaaccagatagtagccaatttataaacgtttagagacaattttgtgtgtctaatagccaaaactgtattcatgtgtttttccctagtggaaactaatatagatagttttcctagctcagtcacttagttcttccaggaatttttggtttgatttgtaactaacattggagaattcggacaaaaattattaaattatgttaaaaaataatagtttaggaaaagaagagacattagatatatttcttgtcttacactctttatatgaggaaattaaaatcatgttactgatggtacatcactaagtaccatctaactggcaaataacagaatataaaatggaaggatttgaaggaatcttttgtttatatgtttttaaaaaattaataaatattataaatataaaaattagtaaaagctttgttaagtgattatgactaaaagtaatatactacaaggcccttctatggcactgtttaagaaatttgtcattcactatctaattgttgttgtcaaaagctatagtgattattttcatgaaacatcatggaacaatcagtggaaagaagagtacagttttaatgtagttttatgcaagcgtatttctttagcacctctatgatctttagagaatatgcacatgatcaaatgtagatctaaaattccacgtgtattttaaattttattttaattatattcagtaatatatatttatatgtgctaattttgaacttaaaggcatgatgaaatttttattctagaataaagcaaaactatactcttaatgattagaatgcaatgttattcagccctattttgtaatctagcttttattatagccatcaggaacagaaactcatttctgtaagcagcatacctatggttttgttatattagctggatcttttattattgatgggtcctgcttgacacattttgtagataatatgcccataggttctgaatcaaacaagtgttatagattgatgtgctaatctaagttttatcttttctttttctattttcagtagtcctcaggaaaccaatatatctgctaaaagtataaaagctttagcctattatgaaaaatgcagatttgttttattatgcagaattttaaagctgaatctgtcctttttattttcctccttctacattaccatctttccctgacctttctctttttccctctccaacaacatcaacaaaaagaaagaaagaaagaaatactttgatgcatttaataagtaacagaattctgtaggaaaatacatacagttagaccttgaacyactcagggttgccaaacccccatgcagctagaaatccatgtataacttctgactcccccaaaacttaactcttaatagcctgttgttgattggaagattaatgataacatgaacagtcaactaacatgtatttggtatgttaagtgtattatatgctgtattcttataataaagtaggatagagaaaataaaatgttaaagacaattaaaaggaagataaaatgtatttaatattcattaagtagaagtggatcatcataaaagtctttgttctttcatctccatattcagtaggccaaggaggagaaggaagagaagggattgttcttgctgtcttattgggtgcaagaaatttctcttataagtgaaaccacgcagctgaaacccctgttgttccagagtgaactgtatttatttttgataaagtaaaatattaagtaaacattatgaacatcagaatgtctaaattggcaagattatcaaaaacaaggaaagtctgagaaactgtcacagccaagaggagcctaaggagatatgacaactgaatataatgtggtatactggctgacatcctggaatagcagagggatattaggtaaaaactttggaagtctgaacaaaatatgacctttagttaataataatgtgtcagtatttttgttctttgaaacaaatgtatcacactattgcaagatgttaatatggtaacatttgtgtatttgtgtgtgttggggggtattatataggaaccgtcagtactatcagctcgcttattttgtaaattcaaagtagttttaaaaaaataaagtctattaatgtaaagaaaataataatgcttaaaaattatttgcttagtgttcactttcaaaattagggtcaaatgtgaagtattgatgaaaaaaagatgtagccacattgccattgtagaagtcctcacattattgtaacgacacagagccattggttatataaaaagctgtttggatggcacagtctgttggcaatccatcagaagatagtcatttgaattagtaaactatctgcacatgtgaaatttgaggaatttccgcatgtaatgtttataagcatgcataatatgaaatttaaaggattaagggtgtaagtctttacaattcaggaaaacctactattatagcttatttattttatttccaagcattatagaacaatataggaaaagagtttgtgatagcaactggcatttgaaaaatattgtcagaaaactgtaaattgttacaaactgaacttggtgacagtgttacggacaagaattagttgagactatattttaagtgacataagcagacaaagacttatagttcagaaaatatagagtggacaattattctgaccataaaaatcaacaatatatcatgttgataaagattatgtggcttgtcaaaatttaagtaacaagattttccttagtctggtaaatgtataatttgaatggtttgtatattcgttttccattttcaattgtttagttagagtgaaggtagtagagattgggataaataaatttcatcattttaaaaattttgtttcatatttcacataatttcagcagacactatgtgttgaggaaagatctttactaagtctcacatataattcttaaaatgaaacaaacctgatgttcgtagaatatacaggtagactttaagtccgctcaaaaatctaactctactctccagtgaagtaaatgaacaaacagaggaagaaatacctagtacactctcaaagaggctttcaattgcattttcttctttgtataaattgatgacattacagttacaatttgtacttattttatccaataactgaatttttgataagttakgcaagtgaatatttatgtatcatgttatagctaacatttgaatttctatttcagatttattctcactaaggaataacatctttccaactacactaaaaagtgaaatgtaaaaagagggcaaaactcactgtgacaatgtcaaaattcattttcaaggagatttcagtctttgtaaatgtggagtcagtatgcattgaaatttccaatacaagctctgagtgaaattcattaaaagggaaatcaatccatattgtcttagtactctttaaagcatatgtaaaataaaatatattgcatagcgaattctaattttattgacacttcttactgcctctcagggatttaaatgtttaaatattttagcagccacactggttaatgtttcaggaatgtcagtgcttcaaaagtataacaaaactttactgctgtgaaaaccatacagcaaactttttttcaagttttttttctaataggaaaatatgtgggttctgctagtaaataatctcacttttgtaaaagaaaagatagaaaaaagttgacaacagattgcaagtagaaataacaaaataggactaatgaaatttgttttaattttagggaattatatttatggactgttaactatctttctgtaatgctggcttaaaaaggcatatgctcaaattttaataatttaaatttttagtaggggagtgattggtgatgtttggtgtaacatttttaaaatgaagaacagaaccctttgagctaatttttctcatgctgaacacaaattttttaaaaggtaaatggatggcctgtttttagtttcacaggagcctggttttgttaaggtgattgaaagattcatgtttcattttagatcctcacttggcccaaaggaagtaatgtttgttaatataagttaatatggctctatctttatttagacagatataatggaggaatgttaatttaaaggtggagacaaagagcactgtcattacaacatagaaacacagatctcctaacagctcagtatggagaaaagttagcctttacttgaaatctcagctgttagtgaagttaaagttatattgtgttgtctagctctgtagaggaattagtatggctagaaagagtgtgtaaaataaagccacatgattcatctttagaataccttttataaatccaggaaaattccacaaatgcctgccttttataagaatagtacaccagagagtcttagtgtggggaaagtctcctgttactgatagttcaagaaataataaagtaatgaagtcctatgtcagcttcctactcactgtttcttacgatgcttattgttttaaaacccagcaattttacaactaaatggagataaaatttagaaatctttctgtagctaggagagtgtgtaagaaataaaatagtattgacttgttgctttttattagtgtagccctaacgttcactcagtatttgtatatcttccaacttaatttcatgtagcattgttgggttaggggatgcccctgtatcagcacttatcctctagttgaaataaagagcatatgctctttaaagagtaactttaataaatcggtagtgaatgtttatggctgacaaatgaccattcccacctcctcaaatttgcatttgtcatcagtccttccactagccttggacagctgaatacagttgttctcccatttggtcctctgtccatggacactaatgctggcaaactctggatttcttggaatatgtcactggtcattggtgactctgctgcacggcagtccaccttctttaatttttaaccccctagatctccccatgggtctagaaatcttgggtagtgccagagaataaatgtgttctggcacatagtcctgaaaaatactgttttgaaaggatcaataaataaaatttgagttattacatgatagagtcattatgcaaagtcttagtaactataaccttaaaaataatgacataatacttatggtagtaatcttcttatttcataaaataaagtcttaatcagaggcagttgtcaaaaaaatttgctatttgttgttcaaaaaaatgagagatgggcttagcttttgctgtgcagtcacctgcatgtatggttttctgtctgggataaatgaatcaggctcttatgtcagccacaactctttgtgaactccagttctgacactaactttgtgaacataactagttacttaacgacattgtaatgttttttcttttcagtacaatgttcataacacatgcctgaatcataaaatatttcttcttttcttcttcctccaccttcttgttcttcttccccttgctccctcccttcttccttccttccttccttctttcctctctctctctctttctttctttctttctctctttctttattttcttttcttctgtttggagactgggtgttactgtgttgcccaggctggcctgaaaatcccacaatcaatcaatcctccccactcagtctccccagtagctgagactatgggtatgtgtcaccctgctgggcttaaataataagacagttctaagcattattttcaacaatgaacattaaaaaccaagacattcagcattgagtaaatactagttgttactccttcctcgaattcttaatttgatttctggggaagtatattcttctgtttttctgccttcctcaaaatctccctacctaggtacctcccatctccacgtttggtatgttttaaagctcagttcttagactttcttcctactttgcttatacctacaactttgatagtttcatcaaatctcctagctttaagtggtggtaaatcacaaagcctctaagtttctatctttatcccataaatttcccctgcactgcagacatatatgtatattaactatctacttgagatcttcacatggatgtttacgaggcctctgaaacatgtsccaaaccaaactcctgatttttgtgcattagcgccccacattttgctctttccattataattaatctcaacaactattaagtctattctttcagttgctaagtgttcgggccacccttgactcctcctttttaagttttacatgtkctaatatcttgataaattctacaggctcttgtaatagggataaaattgctcattattgactaatctaccaaggggattgaatgacaattattaatttcttagacctatagttcttaaagtatggtcaagggactcttaagagtccccaasaccatttctaggaattcatgatgtcaaaactattttcataatgataccaagatattaaaaaccctaatgtttccttgtctttagcatgataatgacagcagtaccatcaaatcttagcatagtgactcacaccgagtatacattaaaatgtggactacacagcaagttaggtagcctgatttacaaagtcaggctctttactataatgctatagtctatcaaaaaataaaatatagcaatttatttaaaaatctgcttaatgtggaacctttgatggttttctatcttttcttctaataatatcataatttaaatcttttgcataaaattgcaccctaatttcttaggacagcacatataatggtatttttgaatgaatggatgttcataattttgatttcctggagatatatatatatatatatgcaaattgtaagacaagaggtttaaataaaattataggccaatagctgcatatgacaggaactattttaccatattctctttaggattgttatcatctttaagtttttaatatttttatagtttaaaagattatatattattcgaagttacaactttttccccacaattatggttgaaggttttttgtttctctttgtcagttttctcttttgaattttatttgtcttttatatctgtcatattgtccttaacagaattctagtttatccctagtgataacagattatgcatgagctttttcatttatttctcttcatatccattttttccttttaagttaagcaaaaataatttttgatattttattttcagatgaaaaatgtattgtaaatggttagataagaaaatagaacaatttactagtagcccctcatatttaaataattctaccctgccctgttttaaaatggcaagctgaatttttaacccttttctacctgtatgtattcttagacatagggaaatgtggccatcattttttccaggcttatagcctcacatggtggtaaaatttattgggagccacaacaattactaaaacccagcagaactgaagaacttcaaaaatataacatttgactttagttttaaatgataagaagcagtttgttgagctgagaaggaaatgaagcaccatattaaaggcagagagaacagcttgggtaaaaagcagaaacataaaagaccagagggtatttgggatacagcaagcagtttggtgtgatgagaaaggaagatgggagatgagcctgtgaagctagtggtggctgatttgaggaaccttgcattcaatactagagagtttttgctttatcttattagtagttggggatttggtaaagattttctatgtagggacagactatgatcaaacttgtagtttgaaggcattcataaaattttagcagcgtttagattattttacttgttaaatccttttccccacttcttttcgtcttgtcattttcatatcggacaacaatgtggttggtattggcctctgcgtgaatgtaaatggtacctagggagcctccagccatgtcaggatcatgagctttctcactgcttcttcttctttgttttgattttgttcttttaatacaagcaaaagtaatttttgacctttgattttaatatgataacacattaaaaacaagcaaatagtacagtttcctcagctttactaactcagatttcattactataaaaagacaaggaaaataataaatatatatgcgtgaagaataggaagaaagctaaatgtattaatgtttttgtcagaaaattttctgcagactttttaaagcttctgtttattgaataatagcttaaataaagatgttaaaaatatttgtaaatatttcatattgatattgggccattcaattcaaaattaatttacttcttagtaaaataaaaataaaagaaacagaagccctgtttctcctagagagggatctcatctcttaaaatatagatcctatgattatcatgtactgaggaagaaactaaatgaattaactccaatattgtgctccttctattgataaattctgtggaatgtttatctcttgagtaaaagaataatagagtaatagcattataatattctcgtaacttaccactaggctagtaaaaattattcctttggccttaattaagtttgaatctctgtaagaggttgggagacatttagtgatggcaaattaacagtgttttacttgtgctgatttatgtataccattaatgtggcagtattttaatttaactgttcttcacctaagctgtgtaatacatgactgcctcaggtaatgatacgtaaaatttcaatgagtattaaggtttattccagggcagcagataatagagactagtatgtttgaagtatttcttgttggtgaatacttcaaaaaaatcttagattttttttttcaatctatatatgttagatattaaattgtttatggactataaaccaatcaaacacaagggctattttaatttttaccttgcttaattttaactgctttatttcatttaaatggcgtataatgttcccaacttgtttaagtcaaaatgcaaaaatgttaatattcatgatattataaattactagaaaattatgtttcacttacatataagatagcttgacacagataaaaattaaacttgaattaaagcacataacagaaaaaataatagcaatctttacaaattagggttgtgtttttacttaggtatactagcataatcagttatatttaagtgagagatcatgtcttgattaatggtgttattaatcatgaataagcaaatatgtctttttctggaacttaatttgggttgtcttttaagaaaatctaacaaacaaaattctaaataaaatttagatgcttataaatttgttgtgtgaactttcagcagaaaactaagttcaactcaaaatagaaaacagaactgtacacagcttagcagtgatgtaaatattgtgaatgcaaggtgcaaggcacatttgaaaataccgcttgtatttcaaacctcaaagcagagcaataataaaagcttacagctagaaggaaattaaaaatcatctaaattttagttttcagtgtattaagtgaagaaattgagacttaaagttatataagcagttaaactcagatatgtttataagaatccgattttcttttagtctactatgtttatatcacaaaaaattgattcatctgacacaattatatacacatctatagaatgatgtaagagtatatgacatataattatgcatatatgcatattagtaatatatgtacacatatatgtattatattagcatttgtaatcatggagaatattagttccttttttttttttttgagacggagtctcactctgtcgcccaggctggagtgcagtggcgcaatctcagctcactgcaagctcttcctcccgggttcacgccattctcctgcctcagcctcccgagtagctgggactacagcctcccgagtgctggcacccgccaccacgcctggctaatttttttgtatttttagtagagttagggtttcaccgtgttagccaggatggtctcaatctcctgaccttgtgatccacctgcctcagcctcccaaagtgctgggatttcaggcgtgagccaccgcscccggacgagaatattatttcataaagatgaatacccttaaaattagaaacaggaagagaaacaagtactcatttttattttatgttagatttgaagatttaatttataattaaaacacacacgcacacatgcacacatacgcacacatgcacacatgcgcgcgcacacacacacatatatatatacacacagatataggtgttttagtgtacatatataatctatagtgaacaatatatttttatttagatacatgtttttatcttttgagtgataattgtcattgctaaatgtagacagagataatatgatgagataggaatacaaatagtggaagcaaaaaacttaaatttagatttccctttttacttactagttggatgtctttaaaaattgattaatatctctgaatccattttgctttcttttctgtataatgaggataagaaaacaaaatttcctggttttgggaaggttccagataatgcatataatgtggtcagcatagtcatttcatgttgtttggttggtacctaccagaacataccagaacatagcagagagacatcccagaacactgaggcaagcaacctcttcatttgtatctcatcatagtagttccaatgtactaatatgattcaaacctgaaaaattatgatatactgactacttgggtacataattactagaaatgaaattatattaataatattagtatacatgaaatgatccttgagaactgaatagccagaggtgatttcatgtttattctttttggctaattatgatctgagtttttatcaacaatagttaaaaatatggactttgagataagagaggcttggtttaaagtgctgggtttaccacttagtagctgtgtgaacattttatctacatctccacagttctgtaaaatgcaataataataatatttttctgataaagttattgtgaaattaaagaaatagcacattgaaaaagcttattgctatacttgatacagaaaagtcaatacatttcaggtgttatatcattgatgttattactaaggcagtggcattttttgtttctcttaagaaaccagacttgatctttgcacaactttagaagtataaatcttatggttaacaatatagatagcaatgcttttggggcaagatatataaattaagagattcattgctattaatagggtaaaacaattaatggagtaattttattttaagggtcatcacattttgactaagatcctttcaaaggctaattcattcattattttatagtttcacttgtgttcttatgctgccaaatattggtgaatttctgtatactataagagaacaggattataaataacattgttaaggtgatttaccaaaaaaacaaaacaaaacaaaacctgattagtactatagtagggcaataatgaaaagagacaaatttagaaaaagtaaaggaaatgctaaatcatgcacttagacaacatacttgtgaaactgttttactgacataatcataaagtctaatctaaaaaatgtagatacatacatacacaaagatttattgaaggaaaacaggatatgtcatggtagatcagcatccttgacattaatcaaaactgatgatgtcattaaagaatttatagattcttttgatatcttctatctatctatctatctatctatctatctatctactttctgtcagagaacttgattgccctttgattctgaatcattagaaaaattacattcttatttggcacagtgcagatagtgaaataattaattgatctatataagcatattggaaatgagaaacagcactttttatactatttgtgattttttaaaactggcatgctattatgctattattcatttttttaaaaagccttggctgggcacggtggctcacacctgtaatcccagcactttgggaggctgaggcaggtagatcacgaggtcaggagtttgagacaggcttgaccaagatggtgaaaccccgtcactaataaaaaatacgaaaattagtcagtcgtgggcacctgtggtcccagctactcgggagtgctgaggcaggagagtcactggagcccgggaggcggaggttgtagtgagctgagatcacaccactgcactctagcccgtgcgacagagcaagattccttctccaaaaggaaaacaaaacaaaacaaaaacaaacaaacaaaaaaaaccagccttagtagtaaacacacgcatttctaattttatttctatatcatttaggttattgttgttataaactttgaaagaatatatcttaaaatactatttttagtaactataaaacattcttttaactcatttgcaaaagactatacttctaatatatccctaccctaatctttgttgattggagttagaaatcagtttattctgagtctcattctgctctctgccaaggcttttccaaattgtccccttagatattttgcttctatatatcctaattctggcttaaagacatttactgaaaaaagtacaggacaaactggagtaacttctgcttcagtatttacctctgcttgctatctaatatagaagaatctatccctaaagtcttcaatagactaatcctttctttgcttgctggactggattagagtgcagtttgtgttcacaggaatgagtttggggatagcctccaaaacatcttctttcagagtccagatgttctaaaccttttactttttgttctatgcaacttggagtattttatgtcaccctcaagatcttttttatttgttaaaacaattatttttcttttcctgagtgtatagcytatgaaacaattgatatagacccaggagtactggattatatcttcctagtaatgttttgttattttatttttttttttagacagaatcttgctttgtcacytaggctggatggagtacagtggcgtgatcatagctcactgcagccttgagctcctgggctcaagtaatcatcccacctcaacctcctgagtagctggggctacagtagtgtgccactatgcctggctagttttttttactttttgtagagacagcatcttggttagttgcccaggctggtcttaaatgcctgggctcaaggaatcctcctgtctccacttcccaaaatattggggttacagttatgagccactgcatccagtccataggaatattttaaatttctgtgtaaacatgtttctattctgtctaactaaataaaagacaaagagagactctctaaaagccaatgatacttattcaggaatggacactgacatgagaaacgtatgccatagtaagctgtgtatgtattcagggaggtaaagaaaggcartggcttaggaggattacataattgttttgagataattatccttggctacaagaatcaatagcaaacatractccagtcaaaggttggacaggcagttggtgggcaaatgttcttgcagaattattgttttgtgtaagggtagggtaggctttgtgcagtgctgtgggttttgcagttttttgtgacagttctttttattacctatttgtgcatgagaactcttccttgacgactttccccagctcagtttatcaagatttttaacacaagcgactcatgtttattttgagtttaaatattttaaatttctctgtgaatatctttctattctgtctgagcttcagaaagtcttaaataatcgctcttagctcataacaagaccagggcttaaaatttaagttccttaaaagaagacacttrccctattctcagagagctttaactttaagagccaatttagcttcgaggattttcttctgactagaaaaaaaaaagatagtagggttagaaaagatagcagtgcaaggtaatgaatgcacaagggacgagggaagacaaacaatggcataaaggccattagttagatttaagtggtgttttgggaggatctgaaagagatggtttgaaatttttcaacttagccaagcaatcctttaagaagataattttagaatcagagtttcttttggcggcttcctcacgcaagaaaatctagacacctgaatacttggaattttcctctctctgcttgtgttaaacttccccaaagttgcctatattattgtcgtttttagttcatcttgccataacaaaatagcatagactaagtggcctaaacaatagatatttattttctcacaattctgaagattagaattttaagatcaaggtgccagcatggtccattgctgctaaaggctgtcttcctggcttgtagatggccacctttttgctgtgtcttcatatggtgggggaaagaaagaacaatctctctggggtcttttttttaagggcactaattccaccataagagccccaactttgtgaccttgtctacacctgattatcttccaagagccctgtgtccaaataccatcacattgggggttaacacttcaacataagaatttgggggtggtgacacgattcagtctatagcaattatctgtgttgctactatgccatttagaatgatagcacttgaattgacttatagtgtgaatgtattgcatgtaagagacaaacgtgggagggtccacaagtacctcgtgtctgtgctcctgaacataatagttggctgtgtttaatagaaaacacaagaaataactaatctctgatggatgaatgattatagatgtgatatatctacaattaaactgttctgaataaaggaagactagctaaggaaagttctcataagttttggatagttgccctaaggcaaagtttgtcctgtatgactgttatttaacaagacaatttacttgttagtcctgtgggatggcacacatttcagtcctgtggaacctctgtctactctcggccctatgaactaatctctatattactcacaaaagaaaaagatgaacacaatcaagaagaacagyagtttttttttagtaacaaggcagatttccaccaaaggggagtcttaaattctgatcagacaatcaaaagttctcacaacgaggggggtcatcattcttaagagctaaaataaattggaaactcaacaaaaaaatgagacatcagacttaatacaggatctccctcactgtcacagtcagagaaacccctgaggaggcctgatgtggcctcaggagaactccctgcttacaagttgagggcactaatccatggcaatcaatgacttttactggtgaactctaggattgtctacggtccccaaggaccaccagaaaaacctattgatcaagtaaagctcaatttattaaacttacggcaacagggaaaactctagttccacagagttttcagagtgcctcaagaggagaagttgaggaaagagatttataaatttgagtatctgggatcaaatggtattaagtgttttggagaaaattgagttaaattggagaacttgattaggttgtgggaattttgtcatctaatagttaagaattggtagacacaggaaagcaagaattgaggcaagttttgacgatgtgctgataagtgagcccttggttcatgtaaacaaatagttctcctgataagtaatctgttagcccatataaaatcagtgtttacccagaaatatttaacatatctttccagaagcaaacagtgaattatttattggcaagtaattttatcctcctgggagggaattactgggagaggattatgctgacagagagagtgccggtccttggtctagttaagtggtattgctgcacaaggtctcagttcttacccaaatacagtaatagccccttatcctcagggatacattctaagacccccagtggatgtaagtcccccagtagatgtctgaaaatgctgatagttccaaccctatataaaccatattttttcctaggcatccatgtctatgataatgtttaacttaattaggcacagtaagagattaacaacaacaataataaaatagaaaagttataacaatataagattcacttttatggagagaagattagttctttccatggatcttaggaacctcagcatatgattttttttgtttccttagtaagtcaagaaagttcaccttttcacttaaagggagcactttacagcttctctttggtatatctgaatttccagcatcattattcttctgcattggggccattattaagtaaaataagggttatttgaacagaagcactgagatactaccacagtcagttaggtaactaagatgtttactaagtgactaatgggcaggtagtatagacaaggtagatacactgaacaaagggaagactcacatcctgggtgggacagagcaggacagcaggaaatttcatcatgctactcagaatggggttatttctggaattttacatttaatatttttggactgtggttgaatgtgagtaactgaaaatgcggaaagcaaagccatggataagggggactactgcataagagtagaacatgtgggattacttgtttgctaaaggataaaatatattttatatttttcattggcttcatttctattataagcatataaaatatgatttttcatacattaataaagattgaagtcattaagcgagagcaattcatccaaaattacttattcaaaaccaaatatactagatgctgttttagcccctgccttcatgaggtttaaatttcagaaaacagaggaggttattggtactttataatgaatgcacgcatatacatatagtttatataaacatagaatacagtaatacagacacatataaatataatctttgggaagattaaacttcattctaatgactttttagagtatgcatgctggtaatataattaaatattatgtagggtgtagaatttgtgaatttgtgttttgggacaactgttggttggctggccttgagggggaatggggtaaagaatactataaagttattaacagagaaaatactcaattgcttcctagaatgtgtggaatttcctgcttccttttatcttttgagattcagaagtggtatggaattattttggcacaccgaggtaaaataagttactttaaaagccaggatcaatccataacacgatatagtactatggccagagagagcattcttcatgctttaataatgtcttactgccattctttgttctttttcaatatgtcaaagaaagaagataagtaagggggaagctagaatgcacccacacgtttgaagcattgaccctgtgccacctccataacaattttacaaagttgtcatttttctcatagctatttttagttggtttcataactatttatagttggtttttgccaacttgtcaaaaatgtcatgtttcaaatttcttcagcgtatttagcatccagtatatgataaggatgcattttggtttctgtttgttaatatttacacttcccatggtaaatgacaatactgcagttactgtgatgtcatattctatgatggcaggttagtattattaaggacatttgctgataataatatatctcattttattttctcttgtcacacattttgccatcaataattcaagacagaaatagtctgtatatcaaaatttgaatattagaaactcatgttttatgtacatatagtatttcgacaatacctttattaaaagggtgaaaaattacgggcaactataatttctcaaccaacttttaactgaaaataagaacacatgtcccttaaagtctcatttctgatgtttaacaaacataatttacagtgaacgcatgacatttattatattggaatctaatataacagttccaaaatggtatttactgacacttgttattcatcgtgaagctgatcactgactagtagtcatcacagataaacatcttccctcaattaaaaaaaaacagttacagattagtcattcatgtaactttatatagaaaaagcattagaaagacttgggttccttgccttgaaggagcaagcctggagaaggaactgttaggtcttcaacttcaggatatacattataactcattgcatgccacacctcatgaaattggaactactcacattgttttcataccaagaatctggaacttcatggatctataacacattatttctcatgtcaaagaatttaaatattaaccagtcatattaaatatcgcttcaaagagtgatactttctctgggaagagatcaatagctttttggaaatggtatttcaacaaatacttaagtggaggtttgtgattgcagtgattatttcaagatctttgtggactgggagtcttccattcaacctggggtgtgaattaaattatgctcatgccttatttagatgtacgtgactgcttgatattgtagtgatgtaaaatgtagacataacttccataccattcaggaaagttagcggggcttgagaaaagggagtgttgtaatgcaggaaatgccattcttaagaatttaaaaatctgttagtaaagtatgaaaaattaatgtcctttcaagtaactaaccttttgaagagaggcctagaagaagttaagagaagttttatattgttgatgatgttatcattgtttttgttctcttcttccctattagatagcatgacattcctgtggtaatattgggttattacagttacatttgtcatatttgattgaatgcacagaatgttgctatatatcttgacttgattatgtatttctatatcattttatttaactcattgaactagcaacacatattactcaggattagcttctctggaaatttagcatttgtttatgaattgagaacattggtccaacaggatgaaataccaacaacttgtcttgctatttattgctctgaatatcttggccctattagcctatgcaattgtactccctgcttttcaccaaacacttcacatgaagtgggatagaaaagggcagagggaagaaaatttgtatttttggcaacttagaatctgttctatgatagaaagtggtgagcaaactaaaagcattagctccagtatatttgagttctttgtgttatttcaatcacccattaaaactgtacacttagcacatttctttttggtttgtaattaacatattaaaaatccagaagaatttgagctttggrgagataattgaatattttatttaatttcttaaaagtgaggatggacattatgtagattatatgactgttcatcattttgcaaagtgaagcccattgaattactgtcagtattacacaactaaagactaatcaactatgtctcgtaacctgagagagattcttgatatagctarcattgttttttcaacaaagattaataattaatttgatacttattctttttattttggtcagcccaaaaggtagtgcaaggaaggagcagagaaaaggaagatgtaggggaaagagggaggagaagagatggaatgtgacttgtcataaaataatattggctagattatgtttcaagtaaaaggaaatctcttaaggaaaaatataaatacagttgacccttgaacaacatgggttggaactatgtgggtccacttgtgtacagattttcctcaatacaacttttgcggaatgtgccttcctttcctgcttccccttccaccttatccaccttatccatccttgagacagcaataccggcctctcctcttcctcttccttctcagcctacttaatgtgaagatgacgaggatgaagacttttatgatgatccacttccactcaatacattttctcttccttatgattttcttcttaacattttcttttctctagcttactatattgtaagaatacagcaataatgcatatgaaatacaaactgtgtgttgatctgctacttatattatcagtaaaacttcctatcaacagtaggttattagtagttaaatttttggctggtcaaaagttatacatggattttcaactctgcagggattgaaaactgcacgttgtccaagagttaacaaccctgtattgctgtgtagttttgttttcaacagaaagacttagctgtgagaaaatggtccttttttgtatttatttaataactacctgttaattgattatattcaactaaatagtgacaccagagtgtaaatatgtagtggtgcaaaaagtagacaccaaatacgtgagagaaaatttacttgtggtcttcctggggaaaaaaaaaaaagaatgaaatttactagaatgcattctcttactagaacttgagtagttcagctgctacctttctggctgttgaaatcaaatagcaaaaattctctgaaggggcaggaatttctgtctgctttgtgtactattgtattttcagagccaagaatatggctgtctaaatatggactcaatagtagtttttgaataaattgtgttgtttatttaattaagtcacatagactaaatatgtaaagtgactagttatattagactataaattccaggcagattaaaaactaaaacttgcattgtatcttggtttatattgtgttgtgtgtaataagcatcagtattaaaaacaagcaaacacctaacaaaatacccaagtcaaaacaactttgggctgataggtgaaacaacgttaatggatcataacagctgacacacatgaaaattagatatatttttggtaataaataacatttgtagaaaagatatattcaacagttttatttgcatataattacaaagaatattttcttatgcataatttttaaataattgcttttaaaatattatagagttaatttttcagggttttttattgtttccttggcaaattcaggtagaatatgtttcctaacagtgtgtaattttgacatacttctctagatagaatgacagcaaaatgcattttagttaaaccacccttcccctgagggcattgtttattgcttatgtgaaatactttgcaaattctttttattctaatatatcaagcaccttctttttctcctttaaaaaattattgttttctggactctaggatatcagattatagcaattttaagttaagcattatttaaataaaataggccttgtcatacatgttttcttagaatggataacaaccatgattttatcttatgtttggataattcacaaagcattgttttgagtggagagcaggttcttatttatatgtacttgctatagcaaaactgctgcaaggatagctccagggatctttctaagtttgaaatgagaaacataactgggagagtcagcatatttatcagactgctttttttttctctaggtgaattgaatatatatatatatatatatatatatatatatatatatatatagcacttttcttctattgttttctacttctgtagtattaagctgtagacaactgctgaatgagaattttaactatcactcccttgaaatcttcgttcataaattccacatacacataacatggacaaatcattgtggcacttatgtcaataattttttttctgtatcatttaggtaccaaatttaatgaaagtctgcctggggaatcaaaatctatttttgttgttaattataaatgctctttacaagtgtatagtttgatactgggccacaagagagaaagcgagaagggctgcagctcttctctccttctctcttttgtcttctttctcatgtttacaacaaggtgagcggagggacgtgtttcaaccctgtttgtgttacagctcttttggtccctccattaggcagrtcccgagttcttgtcctgcatccaggaagaatgaggtatgcagacaactggagggtggacaaggcaaagaggtgctttattgagctacattacacctctcaggagacctgaagttggtagctcatttctgcaggcagattgtcccaacatctgttcagctctcagctaggagggaaaccacagtggatagctcctctccacaggcaggtcaccctgacatctgctcagctctcagctggaaggagacccaatgtggatagctcctctctgcaggcaggtcatcccaacgtctgcctagctcccagctaagaggagacccacagtgggtatctcctctgcaggcaggctgtcccaacatttctttgagtctggctgagtctggggtttttatggacttcacaggggaggaagtgagtgctgatgggttcatgggtggccatgggcaggcctggaaaaagcacagtaaattttcactccagttcacaaaactggcagcccagttcccaggtttcaagctattcccagattcaaggtggggcttcactggggatccacccttttctgcccaggagcctgtcttcctcctgcttccatcaacctgccattcatgacgctcatggtgcccaggctgtttctgccgaggagtgcctgcaggctcgtgtgagctgcccacaacccttcccttggcctccctcccatgctcatcagctctgaaagtccaaagaaggctgaggcagcagggagctagcatatcagcaccaccctgagtgtgtgcacacctggctgggtcataacagttgtcaggcttggcaacaactttgctccgaaatcagagcaggcaccaggtgtggggagaggccagacagtgggaaggtcacttccaagcctccaagagcagagaggcttcccagagagtgcatggatgccagggtccacagccacagctgggtggctgcatctttaccaaggagggtgaggctctgcccctctaacttggaaggggtggggcttttgcctgttcctagctcctgctggctccatggagtgtacagccctggctgtacttccctcatcgcagctggcatcttctcagtggctgccccacacaggccactgttgctatcaatcccccttctgaagaggtacatctaactgctgtgaggatagggatgatgctgctcttcactgcttcgtgctgacaagggacattgttttggggaaaacagcagtcacatctctctcagaggcctatgtaagggtccctggtagaaacrgagccattatccaaggctccagttgtatgaccacttggagcatgatggcctctaggtgagaagaaataattttacaaggaggttaaatatgtgaargaaagtatctagtgctggagataacacaaataagaagtaaaatagactaatcattctgaaaacaatgttgtcactagagtcgtttcacctttgtgaaagaaattaaatcttgtataggtgcagctaagctttaaaggagaaataactgtttagggctgtagggaggtcaagaataaaggggccttgacaaagatgccttatggtgaggaacagaacaaaagcggtaacagtaagcgtagggtatccatggagggttgattgttggtacttatcttttgtgattgttaagttgagatccctgatttctttactctggtacttcgggtgctctcttgggtcaacagaggaaattccgtcagttccctggtcttttactaaagtgtaatgaatccaagaatcaatttcagtgacctttactgctgtaggagtagaaagaagtacacagtaagccctcacccccattctgggactagagagagagaaagggaaggaggtgcctttaccagtgctaagtcccctgggttgaatagaagtggccttattcatgcgattgggcctctgatagttgttgcagttygtgttgcaaatgggccaaataagttgtatgcttaattaaatcagagctttttcagtctagcaagaaatcattggtgagaaaagtctacaccattttgaagggacttaaatccagctttgaaagggtgtttctaacacatagtagggctrtggagagaagagtaatccatggaatatgagtatcttgagacagtttactgaggtgccttttaataatctcatttgtcttttctacctttcctgaggattgtggtctccaagcacagtgaagatagtattgtatgcttattgccttttatacccgctgggtgacagctgccttgaacaaggggccattattgctctgaaggtacttgggaagtccaatgtgaggaattatttcattaattagtgcttttatcacctcagagcctttctctgttcatcatggaaatgcatctacccagttagtgaaggtatctacccatactaggaggtactggatgccccttgtctttggcatatgggtgaaatccatctgccagtcttccccgaggtagactcccatcctttgggttccagggggacacgccattgactgaggggattatttttgaggcaagtctcacaagcattaacaacctgtttgaccatttttagcagattcttacctgagaacaacctttgagcacttgacaggttttatctttatcaaggtgaaaggcttggtggaggatttttaagaacccagctggaacccagctggaagctggtagatgaagcttgctctcctctaattgcagccatcctgaggactgaagtgtgtatccctgagatacagcccattctatctctgcagaggaatactgaggtttcatttcttttatggagtactcccagatcagagggcttcaagtggatcagatatatgaggccctcttgctgccaatttggctgcttggtctgccaacttatttctttcagctattttatgcatccccttttgctggcctttacagtgtattactaccactttccatggaaagaataccatgaataataatctgttaatttcctgatgacacttaatgagagacccattggctgtgaggaagtttgtctctttccagatagtagcatagacatggaggactaggaaagcatgcttagaataagtataaatgttaactgctttccccttgtttaattcaagtgccctcatgagggcaattagctcatctagttgagtactcgtgcctgaggagagaggcgtactctcaataacatcattcagggtgactattgcataccctgccttatggaccccttgctctacaaaggaacttctgtctgtaatgagagtccagtccaggttctctaagggggtttttttgaggtcctctccggctgcataggtttgcactactatctgttcgcagtcctgttcaagctccccagcttcgtctgggaggaaggtggctgagtttagggagagacagtttcttaactatactacagatccctctaatagcagagcttgatatttgagtaggtggttgtctgttagccagaggctccccttagaagacagcagtcctcccacattatatggcacataaactgttaagttattccccatggttaacttaatacctctggttgcaaagctaccactgcaactgccaagaggcaggctggccattctttagctgtcaaaacaagctccttccttaggtaccctatggggtgctgggctggacctcgggcctgggttggaactcccatggccattgccttcctttctgagacataaagattgaacatctcctcattgggaagtctaagggctggtacctcaagcaagatttgttttaataggtcaaaggcccttttagcctctggttcccaagttagggagtggatctggtatttcaccgtgccatgtatctatacctgcagaatactgtagtgcccaagaatgcctcagttgcttgagggttttgaggcaaggaaagaaggacatgggcttgattctttcttcacctagtgcctgggtcccctctgacaagactagacctaggtacttcaccaaagtctggcagagctgagccttagattttgagaccttatatcctgttatccagaaaattaagagctttactgcctccctaagagatttcatcagagttgggacataaaggataatgtatacatattgtaaaactttaacctgagaataaaggaactcagagagatcttttgacacaccttctcaaacaggtgggggctgtctcagaattcctgaggtaacactgtccaggttaactgggtggcctagttggaggaattcttgaatgcaaacaaatactgggagttgaggtgtaggaaggaaaaaggaatcttttagatccaggactgtgaaccatttagttccctcaggtatttcagttagcaggttataggaattgggaaccaccagatgaatagggaccacagcctcattaatgaggcagaggtcctagaccagtctccattccctgttgggtttttgtatccccaatatcagggtattacaagggttgttacagggtttgagaaggccctgaatcttcaggttatcaatgatggcttctagtcatttcctaacttctggtttcagaggatattgtctctggttagagaaggaggtgagatccttaaagtggaccgagaccagtgtggcaattgtggctcagccaattttccctggagtagtccaaacttctgtgttaatattggtctctactatggggagacaaagagtctgtcctggagccataaagatagtggttcccatgtgagccaaaatatccctgcccaagagaggagttgggctttcaggcatgattagaaagcatgagtaaacaagaggtcctgccaactacaactaaggggttgagaaaactattgggttaaaggctttcctgagacaccccttatggtagcactaagagagaagggagtgcctggactggagtggagaacttaaaggactacttcagtgtccaggaggaggtcccctttcctcccttcaactttcagaatcaccctgggttcctggaatgtaatggtggtctggaccaccagagccaggtagaggagccctgggatgtgtgagtcctgctggaccacttgagagactagctctggacctggtgacctgtgtctctggggatagtcttccctccagtggtctccattacctactggacagggtcaaggtggctttctcatgttgcctgggcagtctttcctgaagtgccttggcttgccacatttgtagcagttaacaggtacatctaggggactctggggtttgtgagcctgcaaagagtccattagagcctctgccttttcttttgtttcatgtttttttttttttttttggatttcctcctgatccctattatgaaagaccatggtggccaatttcaggaggttctctaaagtactatctggtcctacagcctatttttgcagcttccttctgatgtctggggctgcccgagtaataaacttatccttcaggttcagttatccttcaactgaatcaagagatagagaggtatgctttaccaagaccccttttagcatttccaggaaggcagtgggtttctcattgaatcccttttctatcatgtttagcttggagtaattaagaggcttagttctagtccttcataagccctccagtatgcacacctgagagtgtttcctcttccattctcccatttcatcattgatgtcccatttattatcctccaatgatactactattcttctaattggattggcactctatgacatacaaagcttatcccccaaattatctgctgctttctgggtggcctgcttttccacagtagtcaggatctgattcaaaagtaacataatgttcttccaggagagttaaaatacttgggttaaattctggaaagcctctatatgcaaatgtcagggtcatttgaaaacttgccaagatctctcttaatctgccttaagttccgtagagaaaagcaaatttggaccttaatgagactatattygccagcctgttgtaggggcaaaagtgcctaaaactaagatttctaggatggaacaaacttagagagaacctggataagggaagtggaaggagatgattcccccaatggaggtacctctggggtttgcttctctatttccctgggattgccccttgcagccttttctgaaattgccaccaggagggcagaatcaatcctacaatgttggcaaaggtccgaacttccctgcaaggcaaagaaagtctgcacatgtgggacttcaaaccatttgctctcatgtctacagaaaagttccagcttcagaatggtattaaaattaatrcttcatttctgaggccatgcttctgcctgcagaacataattcagccacaccttagtgcaaaggaatataaggcagattttctccagagtctgagtattaaggagtcccaggaattcaagatacactctagaggagtataggttaaagatggttgtttacccttctggaagagagaacagaggaggaaaaggtgatttttcttctctccagagtctgagggtcaaaggggtctcagtgattcaggatgcagtcaagaggagtgcaggttgaagatggttggttacccatcaggaaagaggggtaaaaagcatccctttgttcctttctctttccagcaaatacccagggtaggtgaggctaagaaaaaagggcatccctttctttcttctgaccttatatccctaaatccccgtgatctttgcaggtgttgaccatgtgtgcaagtgtgacttcacccatgaggtggggaggcatacccaacaggagtattcacacccacctatatggtgcctaatcctcctgcttttggtaacctttaaattccctagaccttatctatgccatgggtaggaggatgacctccatccacgatgcaggagggcctagttggcaggagttagtcatgctcacctgcgccgtgccccctaaacttcactgtcatgtgcctttggatctctcacatctagtttttctttctagggcctcaaaactaaacttgggacaaaaaaatgcctcaggagggtgtatggacccattaaattagtggcctcaccaaattgcagccagaaactggtggggcagcccatctcttgcttccttattatgaataggtgaagctgtgggaccaggtcctctgcaaacaagggaaagaaagggagtcctgggaattggggacctggcctaacaagatgcttcccaaaagaatgatttaagttcaggggtggggaaggtgcctggggaaaaaaccttttgccctgtgcaaatgggttccttcaacaggggaaagaaaactctcaattgttacatccttcttgcttctaagaatagatagacatcacattgttctgatttacacttctgatgaccaagccaagtgcttattctacccggtattattatctctgtactttgcaacaacacccttatcattgtatataaagaagagataggagccacgacaaccttgaaagaaagaaagaatgataggaaagactggaggtcctagtgctgacaccctaacaggcagtcggggactggagttagttcagaggcctttggataacactgagatatagcctcagccagataccctcatttgccccaggacctccttctgatcccacacgatggctagacctccatgaagggaaactggattggaacaaagccaacattcccaacacccaagggtgatgggggattggcagtgtcctccccagcaagcctgtcctcatgtcttaagtccagcagctatgctagtcactttcaactggccaagagaggcatggcatttttctttcagtttggttgtagtggagtttagggattccccaaaaaaggacagaaagcagcaagtttgcttttactcacccttttgcagatcctggatgagccccccaaaatgtcataggatcctcagggtgttgctttgccagctagaaatctctgtggctggtggtgcctttgcccaagttttgctcaggaccactggacttgatttgctcacttggcctggcagtctgcactcggcttgtactactggctcagatccgatgcctgccaatggtgagccaggcatgaagcggtgaggagtgtgtaagcgagcgatcccagggtccggccactgtgtacaacaaggcacactggctggggctggcgggctgctccaggtgctggcacaggtgctggttccctgcgaggctatggctggaccaggtgtaccgcaagtggcttccactgcaggcaccagggaacactttgtcacccagcagcttggagatcccaggaactgcagaacgccaaatagcgtgtaagagccctggctcagggaactcttagagctgaactccccaaagrgcctcaacttttctctcctcttttctctcttttttcttctcctcttctcgtgctcacaacatgctgactaggggggcatgtttcagccctgtttgtgccattcagcaggtcccaagtacttgtcttgtttccaggaagaatgaggtgcgtgggcaactgcaaggtgagcaaggcaaagaggtgttttattgagctacagtacagctctccagagacctgaagtgggtagcttctttcaacaggcagatcatccagatgtctgttcagctctcagctgagagaagacccacagtgggtagctcctccccacaggcaggttgtcctaatgtctctacaaatctggctgagtccaggcttttatgggcttcaaagaggaggaagtgtgtgctgattgttccatgggcggccatggctgggcccggaaaaggcaccataattttcactctgctccaagcaactggcagcctggcacccaggcttcaggccatccctagcataaaggtgagtcttcaccagggacccacctstttccacccaggagcctatctgctttctgccatcatcaacctgccatccacagcctgcagacccatgccaaccttctctttgccgtccctcccatgcttatcagcacccaawgtccagaggggctcgagacagcagggttctggtgtgtcggtgccaccctgagcatgtgcatacccagcagggtcatggccgtgcccaggctttgtcacaactgtgctccaaaattggagagggcaccagaatcagggaaatttcaggcagcaggagcctgctgagatcaggggaattcctgggccctcaagagctcaggaattcctgagtccatagccgcagctggtttgctgcggctcttaggagagcccctccaacttgtaagggggcagggcctccacctgttcctccttccacctgctccatggagtgcaccgccccagctacacctcccacactgcaaccagcatcttcacagccaccactccacatggaccactgctgccatctttagaaaatagagtctgccacaataagttttttttttttgagatggaatcttgctctgttgcccaggctggggtacagtggcaccatcttggctcactgcaacctccacttcctgcattgaagcaattctcctgcctcagttcctgagcaattgggactacagacatgtgccaccatgcctggctaatttttttttattttgagtagagacagggtttcacccttttggccaggctggtctcgaactcctgacctcaggtgatccacccacctcagctccccatattgctgggattaaaggcgtgagccaccatgcctggccttgccacaataagttttaatggtcctgccaatattaaaatgaaatctttaatgaacaacaagtcataaaccttctatgtgaactacttagaaggagcagactacagatgatgatgccattctaatattatgtgtggaatttttgtcagtgatgaaggacttcacagacctccagtggtgctaaagttcttacacatcgcttttgatggaagcttgaaaaccacttaacctaggtagcatcttctgctctaactggtggctgtgcaatggagaaaatgccgataaagtttttaatagctaatttatcagcaataataattgtttgtgactctgttctttctaatgctatctattgtatgcatatgtatgtgtttatagtatatattatatatgttatatatgcatacatgtgtatgtatgtgtatctacatatatagatagtgtatgtgtgtacgtatatatagatacagatataaacacaggcaaattcttacaactatacacgatctagttttaaatacactaaaagcttatgtcacattgggaaggagggaaccataatgacaaggtaacgtattttccagcattagaattattgaagtatgaactggacatctgtcagagatatttggaatgggagaggataggagtagtagcaatgtagattcagccattaggtgggagtttggagtagaactctgagatctttttatttaattattaatattagtaaaagtaattctgtccccctaaaatgctctttaaattagtttgctagggctggcataacaaaaggtattattgtcttggtggcttaaacaacaaacatttattatctcacagttctggaggctagaagttcaaattcagtgtgtccgtagagttgatttctcctgatggcttctttctgtgtctctagacatcttctcctgatggtttctagatggcttctttctgtgtcttcgatgttttttccactatgtctgcctgtgttgtaatctcttcttcttaaaagggcaccagtcgtactggattagcgcccaccataatgacaatattttaacttaattttctatttattaaaataaatgacactttattcataatttgttttactttacaattagtagggactttataaatgcttatttcatgtttgacattcaagaacaccattggctatatcagcttatatttgaagtgaaggacacttttttgccagccccaaacatactaaagtgttttgagttttaataataagataggtaagcttacaaatggagttcataacttttgctatttttctctatcacttgtgagctttcaattttattgtagaaaaaaatttcacaacgaaatatttgtgaaaagaactattcaaaaactaaggcggccgggcgcggtggctcacgcctgtaatcccagcactttgggaggccaagacgggcggatcacgaggtcaggagatcgagaccatcctggctaacacggtgaaaccccgtctctactaaaaatacaaaaattagccgggcatggtggcgcgtgcctgtagtcccagctacacaggaggctgaggcaggagaatggcgtgaacccgggaggcggagcttgcagtgagtcgagatcgcgccactgcactccagcctgggcgacagagcgaaactccgtctcaaaaaaaaaaaaaaaaaaaaactaaggcaagaaaaaaactgagattaaatgggtcaaaaatatgcaatttcaattataatagacctgatatattccaaccatctgtcataaaatgaaaggttactattggcacacagcgacaaagttaccagaatttgggtgatatgaggtaagcctgaccaaatttaatattttcattttcactttatagttttgtctgagtttccagggtatagttattttcatctgtttttcatattttaagaagtttttacttcaggatattgacagttttacgcaattccttcacatcttaacaaatatctcaagatgatattagccttaaataatatggttgtatagaatacttttaaatttaaattgtaaactaaattgtctcctaataatttgaaggtctttgctttcttcttttgatggctcttctctcacacccatctgtactgtggctgtattttctgattttgtaatgtgctgagaattgtatttcatcttaataaagaaaataagtagatatagactgtgactatatatttgaaatgaagtgttaacatttctgaatactctgcactcgactttttcccctctagtccactacactgctacttcaaataataagaagccctcaccatttctcactttgtttatttcaatagtgctgtcagtggtttcactcagtcttgttcctgtacttaggtgttgcccaggctatttttttttttttttttttttttttttttgagacggagtctcgctctgtcgcccaggctggagtgcagtggcgggatctcggctcactgcaagctccgcctcccgggttcacgccattctcctgcctcagcctcccaagtagctgggactacaggcgcccgccactacgcccggctaattttttgtatttttagtagagacggggtttcaccgttttttagccgggatggtctcgatctcctgacctcgtgatccgcccgcctcggcctcccaaagtgctgggattacaggcgtgagccaccgcgcccggcccggctatttttaaaaatatataaagctgatcatgttgctctttgtttaatgatcggtatcaattcccattaactttaggatcaaatactaatgtttttaagtttttaagtttagaaggtgtttaaggtattgccgatgacctatgcctccagctcagtcttccttaacttcttgtgtcttgtgtcttgtctaggccccaatcacattgaattatttccatttctcaatatatatataacattttctcatatctcaatgccttttagcacactctttcctgtgcttggctagcatcttttcttttcccccatgcctcacttcacttttcttcagtctctcattcatttaccaaagattattgagtgcctcttttgtgcctggcactctactaagtaacaggagtgaacaagactgcaacagtcctactgttttgatcctgccagttactttacttggctggcttctatgattacacttcctaaatggtacaatctcctactacactttaagttactgcaaggcaaatgttttatgttttatcttcacaagttcagcacctactacagtgtctggatatggaatagttcaattaatgctactaaggaatgaatatatatgcctgcttttgctcaatgtgtgctatttacagtcatgatgcaatggcttgtatcttatctgcttcttttttttcatttcttctttcaattctggattaatataatttcatcaaaaaactttgtataggcactaaaaagaaatatttactggttcagtaaatatttactggttcattttggtatttacaataccaaaatgtcattgttacttatgtatttatcaaccaggaaaacagaccagtaaaagatataaagaagtttcttttgtgtatttgtttttgtaacaagtaatcaacgtatgtgattttggagaccggttaggtaagtccaaaatatgtagagctgactatcaggcagagcaggagggaacttttgacaaggatgggatttctatcttcaggaagcctcaactctgctttaagccttttttaactgattgactcagacccatccaggttacctaggataatatcacttaaagctaacagactatggactttacatgtagagaagatattttcacagcaacacttgggttagtatttgaataattggggcttgtagcctagccaagttgacatataaaacaaacaaacaaacaaatcagccaggtatggtggtgtatacctgtagtcccagctactcaggaggctgaggcaggcggatcgcttgagcccaggactttgaggggtagtgcatcatgattgcacctgtgaatagccaccagactccagcttgggcgaataataaaacaccatctcataaagtaaaacagttataaataatatttgctaacattttaaaagaatatcattttcctgatattatactaagcactttacatgcattaattcatttaatcatcaccacaacccaagtgcaagattattattcatagtttactaatgggaaaacaaatgcaaaacactcattctccagtggaacaatagaacaataagtcaatagacttataaccattgttataagtcattttgaaggacagagcttagaacccaaagtatttgtatggtgagtcaaagttgtgatatgttctgatatggattattttttaagaagtttttactttaggatattgataattttgatgcaattctttcacatcttaaaaaaatctcaagatgatattagctttaaatcataaagttgtacaaaatacagtcttaaataatgtggttgtaaaaccaggctgcttgacgttttcacagtttttcttagaataaagaatccagatgtagggatattattgagtataaacaattgaaaaagataaactattacatttacactattacttcagagcagttgatatatttaaatgagaatcagcatgaagtatgttcaatagcatgaggactagcgagaaatagatcaaatttgggtttttctatactcaagctgtgtgaccttgaaaagtgcaatgacagtaataacaatatgccatagaacttttctgaagggtaaaaacaatacagtaagagtaaatgcacagttagtgcagaattgtgtctatcttgtcatttaaatgtttgttaaataatgtattcttttgctaggttaagctttatcagcgggttgttatgtggtagatacatggatcctggatatttggaacagaaaatggaaaagtgaacactctaccaagtcaaaagcaaattctttttttttaaggctgcaatttgccaattaatagtaaactattttggtgaattggagtggtgatctcaaatgtaataaatatgtataaataaaatataatacaagaatatcaaaaacacattacttataactactctaggcaccttcagtcacttaaatgttttaattttgcatgaaagacaaaaatgcctctctgatgaatccttagtagttttgcgaaatttattaaaatataaaatatactgcttttttatgctttaacaatgattttataaattaaaaaaacgatagaaattcagttattaaataaaattattttgatgtagtcaaactggagaaaaggagtaatttaaaattttagtgtttaaatttggcatctcagtttaatatgaatctggaagaaacattttagggaatacagcaataatagaaagtcatttcctgtaatagcatagtttttgtggtgtaataaaaggttacatgacaaggtcagactacttcatttcaaagctaaaaatgatttctactctgccctgaggtttgcagatttctgactgagtggtccctggaaggcttgttcattttgttgtttatatatttaataactatctagaaataaataagactagtgcttagaaccaagttttaggataagcaatttttgtgactatcaagtattttttcttattttaaagtccctatttgtataattaaacatcggtttctcaggcctgaatcatccttttcttatcaactgatggttgctgataaatgacttctactaggtacagttccagtagttgtttagtgaccctgatcttggccaaaaggcctcatctgtctagaaacacatggggacttttattttccaggtatccttgctctgacactctctagtgacagaagcctaagacggaatattctgcacttcatgcaatacattaacaacaaaaattcttttcacagaagagcaaatttagcatataggtttttatgttgttgcctcaaactgttatttatatctatggttggaaataatcgggaaaaatgtattattgatttttcaacccatggatgctgcaaatctatttgaatatggaatggcttgacactgtctcatgttttttatattacattataattgtctgctgttccataattaacctttataaaattaatatgtgaataaaattttttatgcattattaactttttaagtgcaattaaataatggagtaattaaaatttgagtgtttctgtttgttgtactcagtttttatatttgattcaaatgtcacatcagcagtatccattttgttttcgagacggggtctcgccctgtggccaggctagagtgcagtggtgtgatctcggctcactgcaacctccaactccctggatcaagtgattctcctgcctcagcctcccaagtagccgggattacaggcacgtgccaccacatccagctaatttttgtatttttattagagacaggctttcaccatgttgaccagaatggtctcaatctcttgaccttgtgatctgcccacctctgcctcccaaagtgctgggattacaagtgtgaaccaccgcctctgcctcccaaagtgctgggattacaggtgtgaaccaccgcgcccaggcagcactttccgtgttcttttttttttttttttttgaggtgcagtcttgctctgtcacccatactgcagtgcagtggcctgatctcggctcactgcaacctcagcctccccggttcaagcaattctcctgcctcagcctcctgagtagctgggactacagacgtgtgccaccatgcctggctaattttttgtatttttagtagagacagggtttcactatcagtttttatttcttttctctactttcattttcattggcaaattttttccttacctggtctattttttataaaatgtcacataaattaatcacggggagacaaggaagcaatgcaagtacacattattatttatgtgcttgaactgaataagtaatgcctagttatcaataattgacagaatttgaaagaagtgatgtgtgtgtgtcactgatcatgatgtacctcttttgtttacatagtggtttgtgtactgaagtgctagtaaagaagtttgtactttatacaattactcacagttgatataccatgtgaacttcagtttgaaccctgtttttggggagtgactgatgttatttaactaaaccatgtaagtgaagtttttgcatattagaaccatgtaaaaagaggactgaatatacagtatatatattcaatttcattcattatcaggaatatataaattgaagtaacaatgccatactgcactacacacttaaaagaatggctttggtaggcagaattctaagatgacacgtgactccagcccttaatttttatttactgggaagatgatagggcatcactgctgtgattatcagttggcaaaaaggattttgcagatgtaattaaggctactaataagttgactttcagttaatcaaaaaggaaataatgtgggtaggcctcacatgagccctttaaaagcagaaagaatgttttttccctagttggtagcaaaagaagaaatcagagatatttaaagcatgagagggcttcaatgtgaaggatgttccccactgctgagatggatgggccataggccatgaacctgtgagtagccctagaagctcagagtggtccctcgtcacaacagctagcaaggtaaaaggagccttgaatcctgctactggaaggaggtaaattctgtgaacctgagtaagtctggaagtggattattcacacagagacattagataagagcccagattcattgataccttgattttggccttgtaagaccctaatcagggaacccagttgagcccatctggacttctgatctctagaactgtgaaatgattaatggatattgttttaagctcctaagtttgtgttaattttttatgctacaatagaaaattaatataatattaaaactttaataagaaaaaagtgacaaaaccaagtgttggtgtggatgtgaaacaactgaaactctttctctattgttggtaatgcaaattagtacagacagttctgagttgtatttggcagtgactactaaagcagaacataaaacatgactatatcctagaaacgattacagcttattgatatttttccaatataaataagtttgtgcactgtttaaaaaagtacaagaatgttcatagacaattgaaatagccccaaactgaaaatagcttgtgttcattattaacgaaatgtataaataaatcgtggtatattcaccagtggaaagccacacagctatgagaatgaaccagctactactagacatagatgaatcttataatcacacattgaatgaaataaaaaacacataaaagaatatgcgtgggccgggtgcagtggctcatgtctgtaatcccagcactttggaggtggaggtgggcgtatcatgaggtcaagagatcaagaccatcctggccaacatggtgaaaccccgtctctactaaaaaatacaaaaattagcttggcatgatagtgcgcctgtagtcctagctacttgggaggctgaggtaggagaatcacttgaacccaggaggcagaggttgtgttgagctgagatcatgccactgctctccagcctgggtgacagagcgagactccttctaaaaaaataaaaaataaaaaagggcctggctggtggctcatgcctgtaatcccagcactttgggaggctgaggcgggccgatctcgaggtcaggagttcaagaccagcctggccaacctggcaaaatcccatctctactaaaaatacaaaaattagctgacacggtggcgggcgcctgtaatcctagctactcgggaggctgaggaaggagaatcccttggacttgggaggcggaggttgcagtgagccaagatcgtgccactgcactccactctgggagacagagcgagactccgtctcaaaaaacaaaacaaaaccaaaaaaaaaaagaaaagaatatgctcacaaaagaatatgatcccatttgtgtaaaggtcagaaataggcaaaacttatttatggttctataaatgatgataatggttaagttcagaggttccagtagtgtttgggaaggggtaccacaggaggatttagggtgctggtgatgcactgtttattgatcttgatgctgacttagcaggtgtggtcatgttgcaaagattcatttaactgtttatgtataacttaagcacttttcattctttgatgaaaagcttttttagagaaggactataaactgttggcaataccttttccaccctgggatttaaaaaagaaaaattgcccaaggtcatatagctagtgagtgaaaagacttagagcagaaaatatttaaggataatttaataattaatgttttattagaattagatcttttattagactaaatatagaaaggggaaaaaggagatgtgagactagttcataaataattttgacatttacaattcctcggtttttttgaacagtttgccgggaggactcatatcactctgtcgtctcatgtgccgcagtagttcttactcctatggaaccaatgatagaaatgaagaaaagagaagaaccagaatttcctgagccttccaaacagtgagttgttcatttaatttttcaaggccttgtaaaatcaattagataactgataagaaaatgtgatttataataaatgtgttaatattagtataaagaaagaagaaataaattttatgggttaaaaaatcatctattctatattatcttaatgaattaacttctgtgtctcctaacttcatgtctttgaaccatgtgtcattcaagtttcattttgttaccttatcttaaggacatgggcaagtaggctgatgtactttatttccctactctgtgattgtgggtacactgttcttggattgcttactatataagctgtaggctttaatgatataaaatgaaatcagtttttaatataaagtttttaaagttggtttgcatttttataaggaatgtaagttattattttaaaatatttttactaaattagaacaaatttgaactttatactattttagtgttttcatattttttccatttaaacagttcaagctttaatttaaattaaaatttgatcttctattatataaatgataaacttgtactcttataatgactaaagaggcttaagttcatgatgataaatgtaagcttatgtagatgtcaaatattaaataaatggggattatttctgcttatatattaaatacatgaaaaggaaaaaacctgctgagtatttttcagtgagaaatagtatcatgcctcctttaaggtttctggttagtgattaggtgatataaggggctgccaaggattttgggctgaccaccgtaggagtaaggcggaagatatatcttgatgtacctaccatttttctccattggattacactgtgttatagttatttgcttcttgtatgtctttttactagataataagctcttaaggcataattgtgcttgatactgtttgtgaatagggcaatgtatatatttgattgcatgaagatattcagtattaatattcttattatagagggaagaaacactgaccaatttagaaaataatgattttaattcagttttaatacaatctaaaagtcagttaatttaactgctcttcatatagtcttaatttttaagttccaaaagccatttttgtctaatagataattgcatcatgtttgccaattgaattatattagaaagctcaaatgtgttttcctgcaaaamacacacacacacacacacacacacacacacacacacacacatttccttatcttttatttagggtgatatcaccactctctttgttagtattatgtgaaatgatattgagaaaggacctgaaatctaataatccataaagttctagttatgttgaccattctatagcttcagctatcaacattatgggtgacttatggttatatattcttttcatgaaggctcttctgaatgcaaatgtaatatttaaagttgttcatcagacttgtctaactaggcatcctaccgaagtgtcatgcaggttgaatgtcccttattcaaaatgcttgggagcagaagtgtttcagatttcagatgttttcagattttgcaatatttgtattatattagttgagcatcctaaatccaaaaatatgaaatttgaaatggaacatgagcattttctttgattgtcaagttaacactcaaaaagtttcagattttagaacattgggattttcaggtttgggatcttcagtctgttgtaaatatgtctgaagacaaattaataatctcctctaagtactccgtaaattctcaagttgttccatatttaagtaaagctaccatcatttttctttttttaaaatcttggtatgttttcttcctcacatctcatattcaatcagttatcaattacttgattaatgtctccattatattttcttatttcagcagacctggaaggtatatatatcccatattttaaatatctcctaaaatatatcttcagttgtaatcttaatgatgccatctatcaaatggaaattgtttatgtcctacatacccaacactgttattttgagaattaaaagataggtgtgaacatatggcaagaacagagtataaatgcaagcacagtgattaactcaaaactcttgtttgccagtgacagaagccaaatgctaactggtttcagaaaaaaagaatcaagagtgctggtggttattggctcatgtaatttataaagtacaaaggtagcaatttcttcaagtacagttttggttctcaaatgatatcatcaagggtcattctctctatctacatgttttttgcttgactcttctgtctgggcttttcattttctgggaggttcctctagtggtgatattactgccttcagcagccactgggattgattttcattttctccacaaatccagtggaaggagataatttctcattccttttaatcaaagcaaaaaaaaaaaaaaaaaaacaaaacacccagatttgagtgtcattggattggctttgactagcttgccttgtttgacatggcaattctgaaacaatcactatatccaaaagtatttggtggmgattgactagataatttgttgatgttgcatgacaagccctggaacacagaatgaaatttagaggggaaaggtgattccacaattgacatattggtgatattgataaaagaaggcagagatagatgaggtgtcaaaataatgaatgttccatataggtaataatattattatcaccattaattttaaaagtcagaattctttattatatttaaatcataaacattgatatactgaaatataatgcatgtatctttatttcttattttaaatgattttttacctacttaattttattttatgttatttgttctgggtgtgctattgagaggcagtataacacagtggttaggaatccaggcattgggcagattctttccccccaacccccaccaattttcttaacccctgggcactgtggcttgcacctatactcccagatactcacaaggctgaggggaaaggatcatttgaacccaggattttgaggctgcagagagctatgaccatgccactgccttactccagcttgggtgacaaagcaagactgtctctaaaagaaataataaataaataaagcttcttaaccttagtttatttgtttctttttaatatgggagatactttacctcataatgcaatgcctaaaacataatagagatgcaagaacatataaattttgtaatttttttgcaacaaatatatttgttaaatagccacatcaactgtttataaatggtgttactaatgcccttatgatatcagttttgtgtattttggatttcccataagaaaaaaaaaatactagatagggctggacgtggtgactcacacctgtaatcccgcactttgggaggccgaggcgggcggatcacttgaggtcaggagtttgagaccagcctggctaacatggtgaaaccctgtctctactaaaaatacaaaaaaattagccaggcatggtggcagtcacctgtaatcccagctacttgcaaggctgaggcaggagaaccacttgaacctgggaggcagaggttgcagtgagctaagattgtgtcactgcactccagtctgggtgacaagagcaaaacgccatctcaaaaaaaaaaatagtagacataaaataatcacccgccaatataatactaatgctgaaagttgagacactgtctttggataacaaatatttctttttaattttggatggaattacttctttaagtaaattttccccttgaattttacagtcttcacatataaattcataaatcattgagtctttgaaatataggattcatagagtcatctgattcagaacccagtaaattcattgctaagaataactgaaatagtcatctcagaatatgtaagattgtacataagaaagaatatgtaatatataattacatcactttagaaggtaagaaacattttatgactgagatatttgtattatctaaccaatgtttagttatattctgatgataaatattttacttttgactttttttattaaatattctcatgtatttattagtttttagacatttgataaggagaaacaagaattaggaactcctactaggaatgaagtataaatttttcagcatagcaggtgatagggagaaactaactaaatcgttaagaaggaaagctacattgctcattacagtggcggaggaccagagctttccacttcctgcaatatctaaaattcatcttaattcagaaaacaaaggtggggattttacttcacttctgagtttagtttggtatgtaactcagaataccatagaaaggataaactttttaaaaaatagaataatctatgtaatccaaaaagagtgtacaattttcaaatatttaatcataagcatagaatgctggggtcaaagctttgagagtgactgttcacaatagcagagtcatgaaatcaacctaagtgccctcaacagatggttggataaagaaaatgtggtatatatacaccataaaaaagagtgaaatcatgtcttttcagcaacgtggatggagctggaggtcattatcctaagtgaaataactcagaaaatcaaataccacatatccatacgtaataattgggagctaaataatgggcacacatggacatacagaggggaattataaatttataaaaatcctactgttaaaagtataaccaagtatccagctacactcagcatgttcctcaaaactctacatttctcaagtcagttctatgtaaatgagcatttcatgaaatgtacatagaactcaaactctgaagagaatgaaagaataaccatgattggctttggattatattttgtattaatacttttttagaaatgtgcttgttgaaatgcaaatattctgtacataccataactcaatgtctgaatgaagggatttttgtgaccattgtaaagttagaaatgcagaggtaaaagaaaaattattctattacttctttgtccatttccacatttttatattattttatataaataaatctaaccttaggaatagatttgatttattgtttactcttgcatagatgaagcattacttaaacatattgtcattctctccaagtttcaatacctctttgtaatgcttcagtttcttgtcatgaagtaggttctgtaagctccttctgaaaggtaacagacattatcatttagtacaaacgtctcatttttaaagaattgctaacactaacctattttattcttagagggtacttaacacacaggcttaaagttttgtcagctctgtttgtttatttatctgaatgaatagtatatgttagatttggaacagttaagtactctctctaaggtcacctctttagactctctaaagttgttacacaaactctgtggttatattggagacatatcaaagaataatattactagctgatctccaattttcctttaacaatcttcaggagaacatatttatttatgcttttaggcagatatttatttgttaatttatcaaaaataggtaattcttcagtgtctgctttgtttttggcactctgcatagtgctaggggttttgtgttgaaaagcaggtgaaatcccttctgtactaaaaatacaaaaattagctgggcgtggtggcgcacgcctatagttccagctacttgagaggctgaggcaggagaatcacttgaacctgggaggtggaggttgcagtgagccgagattgcgccactgcactccagcctggtgacagagcaagattccctctcaaaaaaaaaaaaaaaatgcaaaagtgtagctgtggctataatgtagatgtgtatctcattataagggctgtagtaagaagttgtaacatagccaaggaggtcaggtaaaacgtccctgaggaggtgactctcgagctaacatccacaggctattagttaactaactgaaaaaacaaaatagcttcttaaagtgttctgtgatggatgggagtgtggagaaattgaaggaaggctcgtgggaggaaaaggaagccaaatcatgttagcagggccaagtgacatggttagatttgccttttgaaaactttctctttgtttgttatagagaacgaattagatgtggttggggtaatggtgaaatggagccgacttgggagagccaatttgatagcagttctccccagctctagattcagtgatttcacagtgaaagtttgaaatcagccatggtgggtgtatttacatcatagcattgggaaattctataaatgaggactttcctcctcccctggagagctagttaaatatttatcagcacattagtaaatggaggatagactgagtggctacagtgagaacatttaggtgattgctgatagtagcttgcactaggttgctggcattgggagtggagaaatgtgaaaagagaactgtgtcaatatgtatttatgaaccttggcaagttaaatatagttattaaactaataacttataatacattactaagtatttgcaataaggatgaaaatgagaaattatctttattactaattgtaattatgttaaatatataatattgtggaaatcctaacatgttatcttgaattagtaatagtttaatgaatggagagtcatgatattcttttaatttatgttgagtattatatcagttgaactataagtgtaacatgcacacacacacacacataaatgcactttgcataaaattcctgtctgaatcattgtcattgattttcactgaaaatgtccacaatataagtaaattccacttagrttcttatgtaaattcttatgattctttactaacaattttccttcatttaccctccatcacttcgtgccttcaaattcttccatttaaaaaattcaatactgaggcatggctaggataaatatcaggataatactatgattaggaaacagccttcttcctcatgcaggcattcaaaagaaacggctagtgtttcatgattttggtcaattcaagggtggaagcagcatctgaggagatcagtgaggagataagatttccatggtgaaagctgttgcctaaatataggtctcttccacagcttttggaggaagttagggatgggaggagaaactttctaacctcaagtctatagtggattttcagaagaatcattcagtgcttcaaatgtgttctctgcagttggaagcacaagggacagatgtggattcatgcctgagaaacttaagcagactgcccagaaaacctcgagggtgaaaaatcgctggccagctgtgaaagcagcaccatctaggactctagagttagtcagggaggctgtagtgtttttgtgaattatctggaggatgaggatacccccataaagaggggcaaaggactctcatgcacccatgactagggaactacagaatactggcccagaaggagacctttgaaaagatcacttgtgggccaatttgctagtctctaaagccaattaaatctccttaaagctcctctgaccgagtaccactacccgctacctttcaccctggtagcaggaatgcattagctgtaccactgaggaagtttaatcttcaggggtcagctttacaatgggccccacataaagccctagaagcaatcctggaaatttttccttcttttctcgtgtgtgtgtgtgtgtgtgtgtgtatgtgtgtgtgtgtgggtgtgtgtgtatgtgttttgagatccctccagatttcataaacttcagggctcacataacctggatttatccctttgtaccatcgcctttagatctgggcactcaggattcttgccttaggccctgcatgtgagagaactgtgtcacatcccttctccagctgctccgccttacataagatgcatttcctgaaagccaacagctcccaccactaggagactatgccttcaccactcactctgtccagaaatcgctgctcaaatggccctaggtcctaccctctggaggaccacataacgcacaacccatgggctgcggaggaacagtcaatcactggtagtggtggacagagcttagagggtcggtgggggcattcacctttctgactgccaggccttggtggaaaggcagccggctagatgttttgtcaactatgctgtattactggtaccttgtgaaaggactgattgccatcaatcttctgtatttttttttatcatctctattcaaccttttggaaagatatgagctcattattcgctggtttatatatattgaaaaaaactaaagaaggttttcaaacgtcaagaaccaatagattttaatatgaaaaataagaatgtttaaaaattcccagagaaactgctgcccttgattgacagtgttgttattttatctctctgctgtttattgctccttagtgagtcataatatttggtcccttgtgcagttaccctgtcaaggcaagaaatcctattgtaacgtttgcatctagtttgacaacccttctttgtacattgagcacacaaatgctatttttcagataagttgggacaacccgataatatgactgaagtgttttagctcaccagtgcagtacagttatcactgtactctttatagagtactataaatacagatttgtcagatcactgaaaaagattgcaggtgcatcaccattgttttgaaagtagctcttatgtgtgcagaaaaagcatggtgccaactttcaattccccgtgctaacctcatcccatgaaaaaaatcgatttgcaaatatataagatattttatttgaatgtgttctataatttaggttttagtataagtcttctagtaatactataaataaatgctatataatccaatattgattttctacttttccccttccaggggagactgactagcagaaaaagcagaaactttgaaatctgaaacatctcatctctatttggcagttagatgacatggagcaaggagcgggtactactgttattgaagtcaagtattcttatatatataataaagacaatagcacctgctttgtaaggtcattgtgaaagtattcaattttcaaagtaaagcaggtagaatcatgctgggcaccaagaggaagcacaataaaaattaccagatttaatatctcttgaatgaggaagttgggcataagaataagggattggatctctaagaatacataatgttctgtggcatttatgcttttagatatttcctcaaatttgcctattcacaatatgtgattatttgcccatttttaaaagaaagtattatcttttttttcctctggtatattaagcccttttacaacaaatgtttcctggttttttttttatcttctattttacttagaatagcaataactagtaggtactcaaaaaatacctgagaattggttaatttttatttacttttgaggtaaaacacattttcttttatttcgaaggtagaaccaaccatgatagttgtccaacattatcaaatttttaaaaattagatatgaatagagcatatttactgttaatattttaatattaacatatttaacatttgaataattaatattgaaaatatcacagggaattaaaacagcaattttgtcatcagtattgaaaagaaagatctgaaaacttgaagtctagaaacctgattgccagccctggaaaagtgctatgttttgctgcatgctaattctcttaactgtgaaacaaacattagcaacacagtgaaattctaatgagcaaaagtctgggaatgcctgttgtaaaatgtgaagtagcataccttacttctttgttttataggggtatctaaaataaacattcattaatatttttaattctttgagttaaagggttcccctgattgatggaaaaatcaaagtacttgtagacagattgattcctgtctgtttctataatatttgaacacctctattatagtactcattagacagaattacaattgcctatattcttcattctctctcactagatattaaagacaggtattttttgaaggacagatgtttctatcattttctttttgaaatattgtgtgtgtaggatgaaattttacattgtaagcataattacgtgttgaatatataaattagggttgtaaactattgtttaaatctagtctttaaaataataaattggtttattcagtaacacttaaatgtatttaatattaggcaccatactgtaatctaagctttgcaaacacgtatccatttaatcttcccaacaagattatatgttgttattatctgcaagctacaggtcagacaacaaaggcacatggagattaagtaacttgtccaggatgacaatttaaaaaaagaataaattgtactttctttctttcttttttttttttttttttatttttttggagatggagtcttgctgtgttgcccaggctggagttcagtggcgcaatctcggctcactgcaacctccacctcccaggttcaagcaattctcctgcctcagcctactgagtagctgggattataggcacgtgccaccacactcggctaatttttgtatttttagtatagacgaggtttcaccatgttagtcaggctggtcttgaactcctgacctcgtgatctgcctgcctcagcctcccaaagtgctaggattacaggtgtgagcccccacgcgggcctgtactttcttttaaattactttaattactaaatttagaatctgacacactgtgaaatcattcttttttttttcaaatgcagttctttttgtagtcttttgtaatctaaaaaatatgaatgtcattataagcaaataatgcttaagatgattagcatttataaatcaacataatataaaggaagaatataagtaacaaaattcttcactgatgattatcacaatcagtacctcttcatttatgtgtatgtttttctctcaaatgagccaggaggaaaactttttttcatgcttctgttctacttagtgtcattagtgtcattattcattttactagctatttctttttcgtctttttatactttaagttttagggtacatgtgcacaatgtgcaggtttgttacatatatacatgtgccatgttggtgtgctgcacccattaactcatcatttacattaggtatatctcctaatgctatccctccccgctccccccaccccacaacaggccctggtgagtaatgttccccttcctctgtccatgtgtactcattgatcaattcccacctataagtgagaatatgcggtgtttggttttttgtccttgcgatagtttgctgagaatgatggctgccagcttcatccatgtccctacaaaggacatgaactcatccttttttatggctgtatagtattctacggtgtatatgtgccacatttacttaatccagtctatcattgttggacatttgggttgggtccaagtctttgctattgtgaatagtgccgcaataaacatacgtgtgcatgtgtctttatagcagcatgatttataatcctttggatatatacccagtaatgggatggctgggtcaaatggtatttctagttccagatccctgaagaatcgccacaccaatttccacaattgttgaactagtttacagtcccaccaacagtgtcaaagtgttcctatttctccacatcctctccagcacctgttgtttcctgactttttaatgattgccattctaactggtgtgagatggtatctcattgtggttttgattgacatttctctgatggccagtgatgatgagcattttttcatgtgttttttggctgcataaatgtcttcttttaagaattgtctgttcatatccttcgaccactttttgatggggttgtttgtttttttcttgtaaatttgtttgagtttattgtagattctggatattagccctttgtcacataaataggttgcaaaaattttctcccattctgtaggttgcctgttcattctgacggtggtttcttttgctgtgcagaaactctttagcttaattagatcccatttgtcacttttggcttttgtttccattgcttttggtgttttagacatgaagtccttgcccatgcctacatcctgaatggtattgcctaggttttcttctagggtttttatggttttaggtctaacatttaagtctttcatccatcttgaattaatttttgtataaggtgtaaggaaggcatccactttcaactttctccatgtggcgaggcagttttcccagcaccatttattgaatagggaatcctttccccattgcttgtttttgtcaggtttgtcaaagatcagatggttgcatatgtgtgggattatttctgagggctctgttctgttctattggtctatatctctgttttggtaccagtaccatgctgttttggttactgtagccttgtagtatagtttgaagtcaggtagcatgatgcctccagctttgttcttttggcttaggattgacgtggcaatgcgggctcttttttggttccataggaactttaaagtagttttttccaattctgtgaagaaagtcagtggtagcttgatggggatggcattgaatctataaattagtttgggcagtatggccattttcacgatattgattcttcctatccatgagtatggaatgttcttccatttgtttgtgtcctcttttatttccttgagcagtggtttgaagttctcgttgaagaggtccttcacatcccttgtaagttggattcctaggtattttattctcattgaagcaattatgaatgggagttcactcatgatttggctctctgttattggtgcataagaatgcttgtgatttttgcacattgattttgtatcctgagactttgctgaagtttcttatcagcttatggagattttgggctgagacaatggggttttctagatatacaatcatgtcatctgcaaacagggacaatttgacttcctcttttcctaattgaataccctctatttccttctcctgcctgattgccctggccagaacttccaacactatgctgaataggagtggtaagagagggcatccttgtcttgtgccagttttcaaagggaatgcttccagtttttgtccattcagtatgatatggctgtgggtttgtcatagaaagcgcttattattttgagatatgtcccatcaatacttaatttattgagagtttttagcacgaagtgttgttgaattttgtcaaaagccttttctgcatctattgagataatcatgtggtttttgtcattggttctgtttatatgctggattacgtttattgattttcgtatgttgaagcagccttgcatcccagggatgaagcccacttgatcatggtggataagctttttgatgtgttgctggattcggtttgccagtattttattgaggatttttgcattaatgttcatcaaggatattggtctaaaattctcttttttttgttgcatctctgccaggctttggtatcaggatgatggttgcctcataaaacgagttagggaggattccctctttttctattgattggaatagtttcagaaggaatggtaccagctgctccttgtacctctggtagaattcggctgtgaatccatctggtcctggactttttttggttggtaagctattaattatagcctcaatttcaaagcctgttattagtctattcagagattcaacttcttcctggttgagatttgggagagtgtgtgtgttgagcaatttatccatttcttctagattttctagtttatttgtgtagaggtgtttctagtattctctgatggtagtttatatttctgtgggatcggtggtgatatcccctttttcattttttattgcatctatttgattcttctctcatttcttctttattagtcttgctagtggtctatcaattttgttgatcttttcaaaaaaccagctcctggattcattgattttttgaagggctttttgtgtctctatttccttcagttctgctctgatcttagttatttcttgccttctgctagcttttgaatgtgtttgctcttgcttctctagttgttttaattgtgatgttagggtgtcaattttagatctttcctgctttctcttgtgggcatttagtgctatacatttctctctacacactgctttgaatgtgtcccagagattctggtatgttgtgtctttgttcttgttggtttcaaagaacatctttatttctgccttcattttgttatgtacccagtagtcattcaggagcaggttgttcagtttccatgtagttgagcggttttgagtgagtttcttaatcctgagttctagtttgattgcactgtgatctgagagacagtttgttatactttctgttcttttacatttgctgaggagtgctttacttccaagtatgtggtcagttttggaacaggtgtggtgtggtgctgaaaagaatgtatattctgttgatttggggtggagagttctgtagatgtctattaggtctgcttggtgcagaactgacttcaattcctggatatccttgttaactttctgtttcattgatctgtctgatgttgacagtggggtgttaaagtctcccattactattgtgtgggagtctaagtcactttgtaggtcactaagtacttgctttatgaatctgagtgctcctgtattgggtgcatatatatttaggatagttagttcttcttgtkgaattgatccctttaccattatgtaatggccttctttgtctctcttgatctttgttggtttaaagtctgttttatccgagactaggattgcaacccctgcctttttttgttttccgtttgcttggcagatcttcctccatccctttattttgagcctatgtgtgtctctgcacatgagatgggtctcctgaatacagcacactaatgggtcttgactctttatccaatttgccagtctgtgtcttttcattggagcatttagtccacatacatttaaggttagtattgtcatgtgtgaatttgatcctgtcattatgatgttacctgattgttttgcttgttagttgatgcagtttcttcctagccttgatggtctttacaatttagcatgtttttgcagtggctggtaccggttgttcctttccatgtttagtgcttccttcaggaggtctttcagggcaggcctggtggtgacagaatctctcagcatttgcttgtctgtaaagtattttatttctccttcacttatgaagcttagtttggctggatatgaaattctgagttgaaaattcttttctttaagaatgttgaatattggcccccactctcttctggcttgtagagtttctgctgagagatcagctgttagtgtgatgggcttccctttgtggataacccaacctttctctctggctgcccttaacattttttccttcatttcaacattggtgaatctgacaattatgtatcttggagttgctcttcttgtggagtatctttgtggcattctctgtattcactgaatgtgaatgttggcctgccttgctagattggggaagttgtcctggataatatcctgcagagtgttttccaacttggttccattctccccatcactttcaggtacaccaattagacgtagatttggtcttttcacatagtcacatatttcttggaggctttgttcgtttctttttattcttttttctctaaacttctcttcacgcttcatttcattcatttcatcttccatcactggtaccctttcttccagttgatcgcatcggttactgaggcttgtgcattcatcacgtagttctcgtgcgtggtttttggctccatgaggtcctttaaggacttctctgtgtttgttattctagttatccattcatctaattttttttcaaagtttttaacttatttgccattggttcgaacttcctcctttagctcggagtagtttgatcttctgaagccttgttctctcaactcatcaaagtcattctccatccagctttattccattgctggtgaggagctgtgttcctttggaggaggagaggtgctttgatttttagagtttctggtttttctgctctgttttttccccatctttgtggttttatctacttttggtctttgatgatggtgacatacagacgggtttttggtgtggatgtcctttctgtttgttagttttccttctaacagtcaggaccctcagctgcaggtctgttggagtttactggaggtccactccagaccctgtttgcctgggtatcagcagcggtggctgcagaacagtggatattggtgaaccgcaaatgctgctccctgatggttcctctggaagttttgtctcagaggagtacctggccggctgtgtgatatgtcaatctgcccctactggggggttcctcccagttaggctactcgggggttagggaccctcttgaggagacagtctgctcattctcagatctcaagctgtgtgctgggagaaccactactctcttgaaagctgtcagacagggacatttaagtctgcagaggttattgctgtcttttgtttgtctgtgcccagcccctagaggtggaggctatggggcaggcaggcctccttgagctgtggtgggctccatccagttcgagcttcccagccactttgtttacctgctctagcctgagcaatggcgggcgcccctcccccagccttgctgccaccttgcagtttgatctcagactgctgtgctagcaatgagcgaggctctgtgggcgtaggaccctctgagccagttgcgggatataatctcctggtgtgccctttgttaagcccgttggaagagcgcagtattagggtgggagtgacccaattttccaggtgctgtctgtcacccgtttctttgactaggaaagtgaattccctgacccgttgcacttcccaggtgagtcgatgcctcgctctgcttcggttcacgcacggtgcgctgcacccactgtcctgcacccactgtctggcactcccccgtgagatgaacctggtacctcacttggaaatgcagaaatcaactgtattctgtgtcactcacgctgggagctgcagactggagctgttcctattcggccatcttggctccaccccccccccccaatttaacttttatttaaagtttaggggtacatgtgcagttttgttatgtaggtaaacatataccatatacctatgtgtcatgggggtttgtgatacaggttatttcatcacccaggtattaagcctagtactcattagtgatttttcctgatcctttcctttcttccaccctccagtctctgataagccccagtgtgtgttgttcccctctatgtatccatgtgttcttatcatttagttcccacttgtaagggagaaaatacagtatgtggttttctgatcctctgttagtttgctaaggataattatctccagctccatgcacattcctgcaaaagacatgatgtttttattttktgttttgttttgtttttttaatggctacgtatatactggctaacttctattcatcttttgttttgaaaagtcacttcttcaactcagaggactctgtcatgtggtctacattctgcaaatttcttttaccttatttaccacagaaacaaatatggaacctaatcaacaattgtagatgttcacaaatcagaggtcctttattgtttcacttttccttgatagtcaaataaaacattcatgggctttgattccaagaactgtgttaagtacagtggtccccactcccacccctcaatctaggaaaattataatcaattcttttcctcctggttgcatcttttcccaatattctcttttgcttaaattcttgatctatctggactattttttaacctcttatgtataggttccatgacattattgtccttaagttccattaaagtcctgacatggactgcttctctcttgctataattttcctcagtcttctatcaggacccttcttcacttttctacatttaccccttgagtgcctcatagtcacttcaaagttgctacttgaaaacacattgtggcaagtagtggtggttgtctacacagttttcagctttcttgaagtaaatgctttctgttttgggatcagcaatgcacttgccacaggtgatgaatcatgtctggtctaaaacttcactagtcatgaaaacctcatttctactttctaggtttttgtcttcaggtgggtatctgagtcagttatggacaaagagacataataggaagtcagccaagggcttccaagaaatattttcctcttgatacatagataaaaactgctttttttgcctcgttctctcccttatgatttgggttttgtctatgaagactgtataattgggcctagagcaccaatcttgagactggaagactgcatgtattgaagtaaacagtaagctgaaaagaaagccagtccaacttttagctactagactttatgctagctaaataacaataaatgtctgtctttctctctatatatattttgagacaaagtcttgctctgttgcccaggctggagtgcaaaggcaggatctcggcttactgcaacccctgcctcctgggttcaagcaattctcctgcctcagccttctgagtagctgggattacaggggcccaccaccatgcccagctaatttttgtatttttagtagagatgaggtttcacaatgttggccaggctggtctcgaactcctgacctcaggtgatccacctgccttggccttccaaagtgctgggattacaggcgtgagccactggtcccggccgtctctattttttaatacctctttacaggatattctgttatgtaataatcaacacagccagaattcctgcttattttcttgaacagagcaacttaacttttgtttttagttgtctgacttagatcatgcacagaaggtcatctcattaagcaacagaatatatatgtcactttgagacaatcataagtgcacttccctgacaattttaatgtacagtagtcattttatctctctgtacataatattcctttctatcatatacttgtttgttcagtatttatcatataggttttcaaatttgatgaaagcagggattgttccccttatgcatgggtgcgtttgcaggtctttgcacaacaccagattctaaaagggcctcaataagcatgtatggaataaacagctgaaagaatgaatatttaatctagtgtttctttgtttgtttgtttgtttgacacgaagtcttgttctgtcactaggctggagtgcagtggcacaatctcggctcactgcaacctgcgcctctgggttcaagcgattctgcctcagcctctggagtagctgaaactacaggcacaagccactatgcccggctaatttttgtatttttagtagagatggagtttcaccatgttggccaggctgttctccatctcttgacctagtgatctgcccaccttggcttcccaaagtgctgtgattacaggcatgagccaccgcacctggcttaatctagtgttttaatgagttgcagtggagaagtcaacacttagtagattgtcttcttataaggattgccatttgaacagtcttgaatgttcagaatagttcataacccagaagaaatggggaaaattagaccttcagagatagcatgttccctgttcctgattcatcaattgtgaggaaatttaaaatgagtgtctggactacatgattgtttaagtcctctctatttttattttattttattttatttatttattttgagacggagtctygctctgttgcccaggctggagtacagtggcgtgatctcagcacactgcaagctccgcctcggcctccatggttcacaccattctcctgcttcagcctcccgagtagctgggactacaggcacccaccaccacacccagctaatttttgtatttttagtagagatggggtttcaccatgttggccaggctgatttcaaactcctgacctcaggtgatccgccccactcggcctcccaaagtgctgagattacaagggtgagccactgcaccaggcgacgtcctctctattttaatatatttcaatcaagaaagcctcatacatctaaagataatatgtattaataaaagccctctaagtatgaatctagtaaatgtggagaccaaaattgcataagaaataatgagaaaaggtttaaatggtgggaaatgagacaacatgaaaataatttgtttagccttacattttacaaaacttagggtataattgcaatgtttgaaaggtacaaaatagaatgctcgctctgaacatatgacatctgtcacttcaattgtatataatgatgttaaagagggtaattttcataagattatacaaggatattgttgattttccctgaagtcttttagaaccatcaattaatgtaacaattatatttttaagcaccttgtgcagaggagagggataggcatgtcaggagaggtttgaggagggattaattttgtaggtagtcagttcactagtgaatattttattgtatggaaaattttacttctctacacagaatcataaatataacaacttggataatacataccagaataatgagactgccttgtactttactgagtttgggattaataattaatactatgggtagacagttttccaaattcatgattaagttttctctgataacaaaagccatttttcaacttttatttctttcaagaagcatacccttgattaatgtttcagtatatcctacagggtcattaacaccagtgtaccagaggaagatgaagagaaaatatttctgcatagagaaatggtatatgacctcaagtattaaaaatgaattctagtatcttagataccaatcttataagtgaaaatcctcttttgagctgcaaaagagaactagtgtgctattttaagatatacccctttaaaacagttttagggagtatataggactggggtaaagaacagagtcttgggagtcagcattcttatatcaattgagtttgctaatcttgggcaaagagggaaattattaataggtagtacgtcacttctaaattctttttttaatttttatttattatacttcaagtgctagggtacatgtgcacaatgtgcaggtttgttacatatgtatacatgcaccatgttggtgtgctgcacccattaactcgtcatttacattaggtatatttcctaacgatatccatcctccctccacccaaccccatgacaggccctagtgtgtgatgttccccttcctgtgtccaggtgttctcattgtttaattcccacctatgagtgagaacatgcggtgtttgtttttttgtccttgcgatagtttgctgagaatgatggtttccagcttcattcatgtccctacaaaggacatgaactcatccatttttatggctgcatagtattccatggtgtatatgtggcacattttcttaatccagtctatcattgttggacatttgggttggttccaagtctttgctattttgaatagtgccgcaataaacatacgtgtgcatgtgtctttatagcagcttgatttataatcctttgggtatatacccagtaattggattgctgggtcaaatggtatttctagttcgatatccctgaggaatcaccacactgtcttccacaatggttgaaccagtttacagtcccaccaacagtgtcaaagtgttcctatttctccacatcctctccagcacctgttgtttcctgactttttaatgattgccattctaactggtgtgagatggtatctcattatggttttgatttgcatatctctgatggtcggtgatgatgagcattttttcatgtgtcttttggctgcataaatgtcttcttttaagaagtgtctgttcatatccttcacccactttttgatggggttgtttgtttttttcttgtaaatttgtttgagttcattgtagattctggatattagccctttgtgagatgagtagattgcaaaaattttctcccattctgtaggttgcctgttcattctgatggtagtttcctttgctgtgcagaagctctttagtttaattagatcccatttgccaattttagcttttgttgccattgcttttggtgtttatacatgaagtccttgcccatgcctatgtcctgaatggtattgcctaggttttcttgtagggattttatggttttatgtctaacatgtaagtctttaatccatcttaaattaatttttatataaggtttaaggaagggatccagtttcagctttctacatatggctagctagttttcccagcaccattttttaaatagggaatcctttccctatttcttgtttttgtcaggtttgtcaaagatcagatggttgcagatgtgtggtattatttctgaggcctctgttctgttccattggtctatagctctgttttggtaccagtaccatgctgttttggttactatagccttgtagtatagtttgaagtgaggtagcataatgcctccagctttgttcttttggcttaggattgtcttggcaatgcgggccctttttggttccataggaactttaaagtagttttttccaattctgtgaagaaagtcattggtagcttgatgggaatgccattgaaactataaattaccttgggcagtatggccattttcacgatattgattcttcctatccatgagtatggaatgttcttccattttttgtgtcgtcttgtttccttgagcagtggtttgaagttctccttgaagaggtccttcacatccctcataagttggattcctaggtattttattctctttgaagcaattgtgaatgggagttcactcatgatttggctctctgttggtctgctattggtgtataagaatgcttgtgattttcgcacattgattttatatcctgagactgctgaatttgcttatcagcttaaggagattttggcctgagacgatggggttttctaaatatacaatcatgttgtctgcaaacagggacaatttgacttcctcttttcctaattgaataccctttatttctttctcctgcctgattgccctggccagaacttccaacactatgttgaataggagtggtgagagagggcatccctgtcttgtgccagttttcaaagggagtaggtccagtttttggccattcagtatgatattggctctgggtttgccataaatagctcttattattttgagagacgtcccaccaatacctaatttattgagcgtttttagcatgaagtgttgttgaattttgtcaaaggccttttctgcatctattgagataatcatgtggtttttgtctttggttctgtttatatgctggattaagtttattgatttgcatatgttgaaccagccttgcatcccagggatgaagcccacttgataatggttgataagctttttgatgtgctgctggatttggtttgccagtattttattgaggatttttgcatcgatgttcattagggatattggtctcaaattctctttttttgttgtgtctctgccaggctttggtatccggatgatgctggcctcataaaatgagttagggaggattccctctttttctagtgattggaatagtttcagaaggaatggtgccagctcctccttgtacctctggtagaatttgggtgtgaatctgtctggtcctggactttttttggttggtaggctgttaattattgcctcaatttcagagcctgttattggtctgttcagggattcaacttcttcctggtttagtcttgggagagtgtatgtgtccaggaatttatccattttttctagattttctagttggtttgcatagaggtgtttatagtattctctaatagtagtttgtatatctgtgggattggtggttatatcccctttagcatcttttattgcatccatttgattcttctctcttttcttctttattagtctggctaggagactatcaattttgttgatcttttcaaaaaaccagctcctggattcattgatttttttgaagggctttttgtgtctctatctccttcagttgtgctctgatcttagttatttcttgccttctgttagcttttgaatgtgtttactcttgcttctctagttgctttaattgtgatgttagggtgtcaattttagatctttcctgctttctcttgtgggcatttagtgctataagtttccctctacacactgctttaaatgtgtcccagagattctgatatgttgagtctttgttctcattggtttcaaagaacatctttatttctgccttcattttgttatgtacccagtagtcattcaggagcaggttgttcagtttccatgtagctgagcagttttgagtgagtttcttaatcctgagttctagttttattgcactgtgatctgagagatagtttgttaaagcttctattcttttacatttgctgaggagtgctttacttccaactaggcttcagaagatcaaacttctccgagctaaaggaggaagttcgaaccctttgaaaagaagataaaaaccttgaaaaaagattagacaaatggctaactggaataaccactgtagagaagtccttaaattacctgatggagctgaaaaacatggcacgagaactacgtgatgaatgcacaagcttcagtagccgattccatcaactggaagaaagggtatcagtgattgaagatcaagtgaatgaaatgaagtgagaagacaagtttagagaaaaaagagtaaaaagaaatgaacaaagcctccaagaaatatggaactatgtgaaaagaccaaatctacatctgattgttgtacctgaaagtgatggggagaatggaaccaagttggaaaactctctgcaggatattatacaggaaaacttccccagcctagaaaggcaggccaacattcaagttcaggaaatacagagatgccacaaagatactcctcgagaagagcaactccaatacacataatggtcagattcaccaaagttgaaatgaaggaaaaaatgttaagggcagccagagagaaaggtcgggttacccacaaagggaagcccatcagactaacagctgatctcttgctagaaactctacaagccagaagagagtgggatccaatattcaacattcttaaagaaaaaataattttccacccagaatttcatatccagccaaactaagcttcataagtgaaggagaaataaaatcctttacagacaagcaaatgctgagagattttgtcaccaccgctcctgccctaaaagagctcctgaaggaagcactaaacatggaaaggaacaaccggtaccagctactgcaaaaacatgctaaattgtaaagaccatcaaggctaggaagaaactgcctcagctaatgagcaaaataatccgctaacatcataatgacaggatcaaattcacacataacaataaattaaccttaaatgtaaatgggctaaatgctccaattaaaagacagactggcaattggataaagagtcaagacccatcagtgtgctgtattcaggagacccatctcatgtgcagagacacacataggctcaaaataaagggatggaggaagatctgccaagcaaacggaaaacaaaaaaaggcaggggttgcaatcctagtcttggataaaacagactttaaaccgacaaaggtcaaaagagacaaagaaggccattacataatggtaaagggatcaattccacaagaagagctaactatcctaaatatatatgcacccaatacaggagcacccagattcataaagcaagtacttagtgaccgacaaagagacttagactcccacacaataataatgggagactttaacatcccactgtcaacattagacagatccacgagacagaaagttagcgaggatatccaggaattgaagtcagctctgcaccaagcagacctaatagacatctacagaactctccaccccaaatcaacagaatatacattcttctcagcaccacatcacacttattccaaaactgactacatatttggaagtaaagcactcctaaattcttgttctatctcatgagagtttggtcacctttgaaatttgaacaaactacaaaatttctttgaatctcagggatttatccttttggaaatttatgcccagtttgtagacttcattagagggataaaaacaaatgtctgcaacgtatctggtatagttggtgctcagtaattttattgaagactacctattttttgcaaataaaagttaaaataaaattctattactaaatcaactccctataccctaacacctatggtcctaagtccaacatatacacttttacaacagttcacgccatagacaggaaatggatatcctggggtagattttttttttccttcaaaatactagtctttttcagctcctcgtacagctttgttgatgcctatatcccttgttttggttactgaccctgggtctccttgcctgggcacctgatttctgtagcttctgttcattcacattcatttcagatgctcttataatttctagttcctaatcttaatctagcttcaacattgccctgcttgcaaatttactaccttttaaaatgacttgaatcttctctattttcacagttcttgtctattttttccctgtaacagtttgtatgaacactaatgtggtgttcaaccctccctttcaattttagagaattggattctatattggaacgtcacttaaatttttgagtcctcaaaaccaaccttgttgaaatggttaataactttgtgaagcatgttgtgactagagaatagtgctttaaaagctataaggattagtgttgttatgaatttgacatgcattaacatgaccattgttaatggacagcttggtacttaatctcccaggttggttaatttatttagacttttgcctacttactttagaaatggatgtctagccatctgctaggcaattacagcttagctgcattgacatctgctttccttcattcttatagacgactgggtgcttgaaaaggcaaatatataaataacttctccaaaataaacagtactctaaaatataatacaattaattacatttgtgcttaaagatgcccactaatttttatatggatacttaaagaaattgcaagtaattataatagaaatgaacaatgatttatagattatatcataatgtcatttatttttagtgrcagttctgtgaattatagcagagatcatcatcttccataaggagatattaaggatccaatacattaaataagaggcccacatttatacagtttggggttctagattataaatagatatttctataattatcaggcccctgcagcaatgcaatagaatggcagggaggaggaggaggaataatcaaaccactttgcttttaccacagaaagacagtcagacattaaaatgaattaaagtcaattcatgtttttatttagctcaggaaaagcattcatttaaatgacttttgcaaaaatctttttattatggttatttgctcagagtttaaaataaacagaaacctctcaaagaacaaacattacttatttaatagtgtaactttacccgtactggggaacataatttattaatagataacattggttctgagtgattcagcaaaaccacgatggatgccacttgaagtcacaacaattaaagaagcttaacagaatggcctcagtttctatggtgacagttacagaactattcagggatagcatgaaacacataaaatattgtgttcttttcagaaaatgatctgtgacagatttatttaaaaatagaaaatagaaaaaattatactcaaacttatttcactcaataacatctgtatttaggagttagaatttaatataaatacattcagtatggagatttgcctcagagattcacatggaattaaaaccaaaaagtttatcaccagatttcctacatttcactgtttataaaagacaagtaggttttattgtcttagaattgatttgtcctcataaactaggtgtgatttcaattttttcagatatttatggagtcttcaggttaacattgaatgaatgtattgtttattttagttaaacacctctcagtttaatcaactatgattcattcaatcaatattttcctttaaatagattgaaggtaactaaagaaaccttaaagaaaataaaagtcatcggccaggcacagtggctcacgcctgtaattccagcactttgggaggccaaggtgggaggatcatgaggtcaagagatcaagaccatcctggccaacatggtgaaaccccgtctctactaaaaatacaaaaattagctgggtgtggtggctcatgcctgttgtttcagctactcaggagtgctgaggcaggagaatcgcttgaacccaggaggcggaggttgcagtgaaccgagattgtgcctctgcactccagcctggcgatagagcgagactacaaaaaaaaaaaaaaaaaaaaaagaaagagaaagaaataaaggaaataatagtcatcaaatacatagaaggaaagagagaccaagataaatcattatttatttgttatgatttctaaggtaacaatgttgaaatgctaataatcaaagtaacattacaaagttatattttattaaacaacaaacttttaacaacagtactagtcatccacattttgcatggtaccttgttaactgaaaaccaggcatattggaaccatgtccttgctttgatttaattttagttacacagaaccatgcaaaatgagaacatagttctgatacatatgagtttcagttaacatggtactatacaaaaagaagcctgtttgtatttacctgttagataattcctatattatgctatgaagacaaagcaagccagaaccattcatcagtattaatatatatggggtgtatggagagtattttgttctttttttgttattacatcctcctcataactaagaataaaaacacatgtttacaatatattttagctacagaatttttatagtacatcttaaacaatttacttttacaaactatttaaacttgttgtttttaaccttgccagattccacaaaagagaagaagtagctcaatgcaaacatatgtaacgtgataataacctagaaattgaataaagaatatcaatataaagccaaagaagtacactaattactgtatttgttatgcttcactaacgttgcataacaaacagctacacatctcaatggtcactggtctttggaataactgtggttctgttttgcttgtctggattaagctaaagagatgtaacttggctttatctaaaggtgggattcaggtctagtatacctgtctcctaaatctggcatcagcagctattcagggaaggttcttctcatgagggagtgcaggaggacaagagggtgagatggaatcatgaacagtctcttttttttttttttgagatggagtttcgctctttttgcccaggctggagtgcaagttttgatatacttgctataattgagccttaatgtttattttggttctagtaatccccacttatccatgggggataaattccaagatccccagtggatgcctgaaaccattgttcatatcaaatcctatgtatgctatgtttttgcctatacatacatacatagatacttatgataaaatgtaatgtgtaaattaggcacagttggagattgacaacaataatgaataattaaatagaacaataataacaatttactgtaataaaagttatgtgaatatagtctctccctctctttcaaaatatcttattgtttgtaatattttcagactgtgatcgactgtgcagtctgaaactgtgattgactgygcagaactgaaactgcagaaagcaaaacaaaagataagtgtagactactgtataatgacattaaaaataagctgaaacactgacatttacatagttcttattatgttcagaatattaacattttgataaagtttaagttgagagtatcctcatgaaatctgatacatacaatagacttgaagtataagttacaaagtcttaactgcctcattgtaaattataatggcatgattattccatcaacaattgtttggtttaatattatttcagtgaagacaggtgccatgcattttagatgataaaaattctaagtcttgtctgtgttttccctgaaatgaatcaagggattaatgttttccatgcctcatattctttaagtcttcatattcacatcacaaaaagaattaaatagaaaagaaattctttatatgtgttttaaatacttacaagtcttatattgttttagaggttacaggtattatagagaagtgccacttaacaatttaaatagaggcagaaatgaagacaaagattaaaattaggcatcattttctcataaaacgtgaacagactttttaaaactccacttataagttttaaaaaatctctctgcaattgatgagttgattatgtaataaatattgaagccctaattaattatttggaaatctttatcaataaataagccctatgtttctaaaaatagttatgaaatatatatgtgtgtgtatatgtatgtgtatakgtgtgtgtgtgtgtgtgcatatgtgtgtgtttgtgtgtatttgtatgtgacattttaaggctttattaccatatggctgaatcgatgccctratttcaaattgttaatttggtactgtcttttaagtgcctactatatgcaaggtacatataccaaatgtatgtcttccaaattcccttgttaaaaatcacctgcctcttactcaggaactaccaagagatctatttcatgtctctatatatgaaatgctgcccttaccaatgctgaagtgtctcccattttctgcctatttaaatttctttgatttcttagcaaaaactgtgcatgtgtaatgaaatttgggacactagttaatggtgcttgaattaaactcttcatttttctttataagcttctcttggtttctggacatgccttgtgattaatatcaatatatatgaattactcaatggttttgtttttatttttttcacactatctatttgcctgagcttgtatgtcttcataaccagttatgaccaaacctgttgttcaaccctggttcataacaatctaaccaaaatggtatcataactccaggagcagaagaatttttgtcagatcttaatgacaattataagcaaggaaaaggataaatgaaattacatgatttctcatgttccatcatagcttgagcttttagggcaccctctaaaagaactatttggactattttgctatgaccaagccatcagttgtttctcctttggggttaattcagaaagcagctaggaataagtttatttcatggaaaaacacaaacatggagggaccaaattagtcatttatggggacaattagattttaaaattgcaattttatacactacataaaatcaaagaagagaaatttaaaagtactgcatctaatgttcctttcttattaatggtgttttctgttccagtcaccattttggctttcttcagagtttgtaatcaataaagaccctggcgtttgaagggcatattattctttttccctttttttcatgctagaaacatcatctctatgagttcatcatgtactcgattaattctcaacagctgctctttaatattattttgaagccccagatagttgatctgtgttttgaattacccacagtgttctaaaatgggcatctatatgtgatttttataatcaggaaaaaataagagtgagaaaaggtcatcatacttgatccacattttttttttttagacagttttgccctatcacccacgctggagtgtagtggtacaatcacagctcactgcaacttccatctcccaggatcaagtgactctggtgcctcagccccctgagtagctggaattacacacgtgtgccaccacgcccagctaatttttctattttaacagagtttggatctcactatgttggccaggctttttttgaactcctggcttcaagtgatctacccgccaactcctcctaaagtgctaggattaccggcgagaaccactgctcccggcccacatcttttgtttaaatcatatttatatcattttacctggaaatagcattacagcatagacttggaagagaagcagccaagaaaacaaacaagcaagaaaacaaacaaacaaataaattaatatttttattataaagtttgaagacctattctggtggcaatgtgctatgtgatttcgaaattatgcccaatataggaaattaacagtagccctgcattgcttcagagttttattatttttctaagtaaaatatatatgatgataataattgggaaacaaaggaaaataaaataaaattctgactaaaaacaaacaaaaaataagattgtttctgaaggagaatatggctctatatattctatataaagaatatatagagcaaacaagtatagtctaacttaatgaagtgttttcactcttgtcattttaattggaaaaaatttattctagaaagtaatatagaaagataataaaatgacatatcgatgaggaatttatccctttgtacctttgctgaccttcattacagattcatttttaaatcattttgttattgatggtaataaatatatttgatattcacaggaatttcacttgaaaaagataaaagatttcatagtagtaatagaatgttggctaagtagctaattattgcatacttaaatttccggtctttaaagtgacaaaaattctagatcttgcaattaacgatattaatatgtgttgacataaaatgagactgtgttgatctaggggtgataaacactgccatttttggaggattatgttttagcaagtaaattgtgtcctttgacttaataataattgcttctcgtttgtctccactcttttcgttttgcttcgactgtccacaacaaccagctttgtcctctagaagcattttaattttatctatgacagttcaactgttactctctatgctcacagtgggaaaatgtcagtggaaaaatatcagtataaatatgatttttgtaagatgcaaacattttgaaaatataatctatatgcccacttgtcatgtgtttctaagctgtactatgttgttgtggaaaacattggaaatttattttttaaagtcgcctagcagatgaaggaaacacaattaagatgatcttttcctaaatatactttggccctttatatgtagactgcagttatatttttatgtattgtataccttgttaattatccaaaattatttttttaaacttgatgttaaattgctttatagaaataaatttatcatcttttatcaacggttagctgtcataattgctgataggactaatgtaataattacatttttatcttaaagaattctgtaggtttgtttgaacaatccagacacaaaactctaccatatatatcaatcaaatattttacaacatataaaattatagagcaaaatatgacattttaaaagctgaacattagtaattttagattttctgaatacatcaattctcacactgctatcaagaactacctgagactgggtaatttataaagaaaagaggtttagttgactcacagtttcataggctgtacaggaatcatggctagggagacctcaggaaacttaccagcatggaggaagtgtgaaggggaagcaagcaggtcttcatgtggcagcaggagagagagaaagagagcacaaggggaagtgcaacacccttttaaacaatcagatctcttgagaattcactaactgtgaggagaagaacaaagaggaaatctgtccccatgatccaatcacctcccaccaggtccttcccttaacattggggatttcaattcaacatgagatttgtgtgggtgcacagagccaaactatatcactaaaagtttgtgttctctaagtagcacagcaaattgtacataagaggatctaagcaaatattctgctactattgtcagaagcggtggacaatgcctcaggtggatgttgagggtggcaagatgacagactatagaaataaattacttcactgggaaaaacaccactttttctcaaggaaaaaaaacaagatcgaagaagagaaaatgcataaaagcatttgagaaaaaatatacatatatgtatatatcttggatatttatttttaattaagctgacttttaaacacagagctcttttaaaaataatccttttaaatctctttataccagacagactatagccagaacaaatagctgaaacttctggcttttaagccatttttttttctttcctcaaaggkgttttctcaagtgaaaccaataagcatcactaaggttttctgacttaaccacagatgcacaagatgacttcggagagatgccaagcatctagaatcaccgctaaggtagctcagagaaaagaaaattcacgtcagaaaatcagaaactgtacatggagggaaaaagaataaataaatgcaaaagtcctacaagtgtcaaaccagaaaaaactgagtccctaagccaggaattgaaccctagccatcattatgaaagagcaaatctttagctactgagctgcagtatgagatgagtgttatattgttttttcccagaagaaggctagaacagtcatttttgagcttgcaaagggtacacctttacaagggaaaagaaactgatgtaaagctgagacgtcttaaaacagattttagaattaaaagtcagtatttcttgtggtcttactataagcgaaccaatacttaaataagaaaacttgttttaacacaggggaccaaaatttagaaagattattattttttctttttttaattatactttaagttttagggtacatgtgcacaacgtgcaggttagttacatatgtatacgtgtgccatgttggtgtgctgcacccatcagctcgtcatttaacattaggtatatctcctaatgctatccctccccactccctcaaccccataacaggccccagtgtgtgatgttccctttcctgtgtccatgtgttctcattgttcaattcccacctatgagtgagaacatgcggtttttggttttttctccttgcgatagtttgctgaraaggatggtttccagcttcatccatgtccctacaaaggacatgaactcatcattttttatggctgcatagtattccatggtgtattataaataaattttatttcagttatggctaatttaattatatataatttttaaaataagctccctttttataaaccttatcatgacttacatagatcatctatgacatgcttagactttttgacttatcgtatacttttttctttcctaaaaagtcattctactttaggacaagaatttaccacacatgatcctttctcatataacatttatttccttttacctttatcaccaaaaatacataattgtattcataacctttgcatttttctttcctactgattttttatctttttcacttatttctgatttcttcttaaatcgatattttaagacccacttttaagtaatgtccaattggccaattttttttcaataagatcatatcttctttggcatatttcatatacagaattatatacaaatttttattaatcctaaatttccatgaacttatcacatgaacttgaaaaatgcttggacttaacttatgaatggtcttttatttataagcctgtttggcactctgtagacmcaatatataacataatgaaatgtacatacacataaacacatctagatatgtatacacacacataaacaaagatccaatagcttttatcttaggactctagccatgaaataataacacaaattcactgttttataaatgatagctggatccaaattctctctctaaaaaactgggacttttccacatggctaagcttgatttctaatttgaatttttctgattgcctaaaagactgcctagtgactagttcttcgggactggccattgtctccatgtctaataaggatctattagacaaaagtttttytaagtctagcaagagctcagttattttcctctcaaattctcacctcatatagcaaagtgtaaaataaagtgacaataagaaaaatggtaaaaatgtgtaaatttgtagaaatgctattacagaaaatgatgactttaggatagaaaacaagaaaagggaaaaccatgatgtccttagggtggactctaactcacaatcctagagagaatgccaattccaaacattgcagagcatccaggggcagccagtggtattaaatgccaaaaaacccagagtatccaaatatcaactaacaagggtccctgcaccaaatgccaaaaactgaaacatctttgggttgccaatagtgaaccccaaagacactaggcctaaaacaactggggccacagaacaacatgattttggcattgcaaggtcaacacaacaggagacatctcacaaccaagtgtcctgccttaaaccattgcccaaataggtaaagcaaagactacaaacacgataatgaaataaacataagcatgcattttggcactaagaacagaaaagtaaaattgccagttattagaaatgaacgagaaaaggtctgagagaaggggcaacagatgggctacaaaggacttggctggccagacgtgctcccatctggggcacccagacaatggcagactgcaactgggcttcaaagccagaagccttacggccacttccccatctgtccaaaataaagaatgtagggaaagacagaggaaccaaaatcaaagcggggcagggaaaagacagtaagttgaatctagactatgggagacccacccaccaattaggtctaagtgatgctgattgatcttaatttggggtcttgggggatgtctccattgtcacttcatcagtcatcagaaaagatgtcacagagtgagccctgagggctgctgctgattggctacttttatggtttttttgatcatgtgctaaacaaggcgtggattattcatgagttttggaaacggacagggcatttttgaaactgagagttcatctttctttcagaccatacagagtaacttctggatgttgccatggtatttgtaaactgccttggcactgatgggagtttcctttagtatgatagtatattataatttgcatataatgagcagtgaggacaaccagaggttgctttttttgccatcttggttttggcagattttcgccaacttctttaccgcatcctgttttatcagtatggtcttgtaaaacaatcctgctgaattcctaattcactcccattaaagtctcttagtcttatttaaccgtttgggtaaaatttctccccctctctccttccacagtactttgatcttatctctgtaatacacttacaactttgtcttgcgattctatttgcatgtctgtttagggacaaagggatgttttattcaacttctaccctctgtaccttcctcagacctagcacatgttgttgctcagaaaatgytgaattagtgtatgagcacaagaagcagagttttaaatattctagtcctctatgtaggttatctgtatattgaaggaaatttttcccaaagggataacattaagtaaagccaatgattattaaaattttttttcagaattttcatctagttaattttcttataatcagaaaaaaatgcagttcagaaaatattttttcatgtcatgagcaaaattctagtaaagaaccagaagtaaaatataaaatatgcatatgtttcttgtttgtgtttttgaaactgaagaactcttgtggttggcttgtatttcaactcacattttttaattcatccaaataaatgtttttcagcatttaaatattaactttaggccgggcatggtggctcacgcctgtaatcctagtgctttgagaggccaaggcaggtggattgcctgagctcaggagttcgagaccagcctaggcaacatgatgaaaccctgtctctactaaaaaatacaaaaaattagccaggcatggtagtgtgtgcctgtagtcccagctattcaggaggctgagtcaggagaatggcttgaacctgggaggcggaggtcacattgagccaaaattgtgccattgcactccaacctggatgacagagtgagactccgtgtccaaaaaaaaaaaaaataaataaataactttcaaaaataacaagaattgttaaacattgttaaactaaataataggttctatgctacattctatatttcactcacattgcttttcattttggacatcaggtattctttttaagcttgtatgccaataatttggttctgttcctaaaaaataaatgaatagatttggttgacgcactctcgtttcagttctcttgtctcaaataaaatctttaactagttattgcatacgtttactatcttttattcaaaattttgacaactaacaaggaaaactgaagaattaaatgaagcataaaggaatgtggttttgtacacagaaataaaatccaagcatgaaagaacacactagttttgttcttaacactgattgctatttgctaaaacagcagtgattacttctttcctgcatccgcaataaagtcataatggctcagaacaaagcttaaaaaaaaatagacatgttgaaagttgtgccattattccttactgcccttcctttgtccctgaaaaatgcaaaaaaaaaaacaataagaggcttgtaagagagaaaggagaaaataataaagaatgatagaggactttataccgtctaaacattatttgaaaaaaacatacaactattaaatttcaaactgtgacagttaatctctgtgatttttatagtttatttttcttacatgaaaaattgctacattctttctggacaagagaaattgagatagagatagaaatatatatatatgtatcatatatagaggtagaaaaagacaaaaatacaatcatttcatacattttatagtctataatggtcaatttaagctatacagcagttattcagtatggaatattggagagaaagagataaaggtatgattttatgtatatccattaccattcttttttaatcaaggtaggactgttcctcatctggccacttctcttcagggcctctaaattgtgaatgccaggagcaaatgtaaaggctaatttcgatgattactttgaattcttttttagttgtgctagctttcatttctacagaaaatctgcttttaaaagatgatttccattttctaacaaacatttgacaactcagtgagaagattcaattttattttatatagatattttatattttatatggatataatattagtaagcatgaacataaaagaactctgaaaatgaagaattttcataaatgtaaccgataatgtagtgtgcttatatagaaataccttagggctgaaatgttaattcatgtgtgaatctggtttcattgtgtggttttaggttaaatatatttaattgtttatcttttggttggatgactgggaaagtaatggatgcacaagaatttttaggattttggaaaaattgtactgaaaattgcctctcagaaaagcagttacgttgggtatacagtgagtataagaatgaagttgttcataaaatctaataaaggaggaataaaatttggttagtttggtctatttatctatacattcatttatctcaccttgaatgtccttcaacaatctggtttattaaaattaaagttgtcctttttctggattttttttcatttagacctcacagacttgttcagtttgtttctagatgaaacaaacttgttatcttgctcacatgaggtttcttccccgctacatttggaatcatttaaatttttctctacataggaatcctccaatctttctcagcgttatagcatttgggcctaacctccctcaagaaaggagcaaactctaagtgattccrtatgtcctcctattgaaaatcattaattccgagctttagtatagtgatgagacatttagggaacatttgggtattgctgtcaagtaattttattgcctccttcatgaattagttccactacagtatcagatgtaatggagactgttgaagtttcattactggtaaccgggtgatctagcttaattatagtataattaatatcttttttatttaaaacataatgctgattttaacataattaagcacttaagctcattgacaatagaaataactttatcttaaaggttgattgtcttatctcaaatactataactaaatttggggtatctgatttcttgacatttgctaaacaaccttactaaaataggattagcatatattgttttaatatatttcttttttaggaaactttgaattttaagatattttgttaagctaatatgtgtgtgtaaataaataaatcacacacacccatttaataaattaaaagattcagtctcaggtggaaatcgcaatcatagaagagtttgggaattaatacgtttttgctattgtgtattttcacatatgtgtgtcaatgagtatgtggatgtgtttgtgtgcaaaaagagcgttttttatagcataaagtaggtaattgtttcatttaatatctaagcagaaggccaagttttacttcacacttcctttttagaaggtttagacatatgaagtgcaaggattcttctgttaaagaataatattccaggagactttgtctacagcacctgggaagtgtaataaaaaacaaagaataataagagtgatgcattgttccatatcctataaaagaactttctgaaatttgctaagtcgtttgccatctacatgtaagaataagacagttatactgattaaaacaaggaattgagtcatattttctaccactacaattgcaatcattttttttataactatgtgaaatgcaatttccttaagccaagtaccatctttaacctgaaagtgtaaacccttgacttaraacaattttagagattaaccttttcattctgccttcttcctgtcagctgatttctggatcattgtgcttgaacgttattatcacaattatttcctgattttttcccctcatttattagttccagttgcatcctgaattacagcagaatgatggttagatgtatattgggtttactcatgtcaccttcactgctcatagctgggtgggctagcacattgattagcatacttgaatatttaaaacgtgctttatagaactaaatatttgggttatgaatattaacatattcaatgaatatagaaacaattttatctaaccaattgttttgctatctcaaaaatcataactaaatttttatgggacatagtgattaaatctgtgtctaaaagcaattaatgccctatatctgtagtaatgtcagattttcatggtttattaatctcacagtgtgctagaactttaacatttctccttagatgtgctcattcacattggaacataagatatgatattgaaagaattcttaaaggacaaatgcaggcaaaaataaatgaaatggaataaatatatcctataatatgcagaaaaatattccattaccaataacgtcatgcattttaaaactctattcttttaggtatttattgctttttaaccttcgctgaaatgagactgagatcaataaaggtattaaatggtttctaaatagccaaaatacgcaagtatttttgttttctaaggtgaattctttagtgaactttttgaaatgtaataattggcattgtctttcaagttaccattacaaaaacaagtgagaattaaagtagaaactataacattaattttttttatgtcttatcttaaaaataaacccttggaacatacatttcaactggcttaatcacatatgagacaaagaaatgagaagttataactaggcaagtcctggacttcaacgttgtcttttccagcttttccatgacactattgcaatcaaatgttatctttctttcatgctttggaacattcctattgcaacaatgaggagaagaagatttggggaaatatagcagattaagagcttgagctgtgtgctgctgccatgagcagccataaacacctgctcactgatgacatctcatagctagtgttataattgaagttgtagtgatatctccagagagatcatagagcaaaggataggcccagcagtagaaaaagactctgggccttcgtggtgctsagtaagagttgatgatgagtcacagtagcagggtcctggcccagacctccgatgaccacatggacaaggaagttgatgcaggggaaggagtctgtgagccattgtggcccaatgagcacatcctaactcattctaatatgaaaagattagggagatgaggaaaaaccagcaaagagactggaagggagttgccaatgagatggaattggaaactgttagcaggaaagtgtttctaccacaagggagtaatcaaccaactcaaatgttactgagagatagagtaagatgaagctagaaatcagtctgggtgcagtggctcatgcctgtaatctcaccactttgggaggccacggcaagcagatcatgaggtcaagagattgagaccatcctggccaacatggtgaaaccccgtctctactaaaaatacaaaaactagccgggcgtggtggcacacacctgtagtcccagctactcgggaggctgaggcaggagaattgtgtgaacccgggaggtggaggttgcggtgagccgagattgcaccactgcactccaacctggtgatagagcaagactccatctcaaaaaaagaaagaagataaaaatccttggtaacttcaacacagctttacrttggtgaagattcaagtgctattcgaatgagttcagagacaatagactaaaaggagttagagttggtgcatataggaaaccctcaaccagttttgttgtaaagtggaatagataaatgaggcagtatcttgagagataattcaggttcaggaatttttctaaagataggtgatatagagctcctgtttggatgctctgcagataataaaagatgaaagatttatacaatctgaggagaaagcagagtatgtgcttcaagtaataacgtgtaaagagaacaaaatgatggtatgggaggcagaaagaaaataattgatgagagaggaatttctcaaataggtataaggggaggtaatctagttaacctttagaggggatggcttaaccacaaagaacccagacaaagaggtaagcaaatatatgataacatccttgtaggtatgaatatgtggtggtgggtttgagaaagttttgtttgttctattttctgtgaaacagaaagcaaggtcatcagctgagagtgaggatgagataagaggtactggaggtttgagaagagagaaaaaatgaatacccagtggtccaggacaaggtcggcaaactgggcaacatacatatttttccgtagatatgtggtcacagatcattttttaaagttcactttcaaaatcctcttcttcatgatgtcatctctaaaactgatctgcctgagaatggagatgcaatataggcttttctttcccacctctcctttcactgtctctactccataccccactccttttctgggttctactatggtgccttgtctctggttggtaaaatttcttgaattccaagcaaaaaaaaaaaagaaaaaaacagtatcaggaacaaatccttttgaaaatcaaatggtttataaattctttgattttatcaatactgaggaagggcttaatcaatataacatgtgttagataactaggtattacatttgatgatttattgttatgtgatttttggcattcttagtagttcaacagactgacagacatgcctataacaagactccttccattctcttctactttcttattcttatgtctgtaagatggataatgaggatagaaatgacatgaacctatgttaattttagcaataattcaaatgtgaatcagaaaaataactgaaaatrtgtttgtatcttacactgtgatatattccaataaaatgatacctttgtacttgataattactaatccaatcacatttagaataattactgatctaatcatatttagaatatgtttatctattttgattaactgtaaactgctaataattgcaataagtcattatagtaggaaacaatacttaaagcttaatggtcacaaaaataatttgtgtaagtaaaacatgtcttcttctggacaaataacacatttatttatcagaaattaaatcatttataattattgaatttatggtaaaattcattgatttcatattaacaaatgttgaagttatagaattttttataattattttagaagattcacaagcaaagccgcttgtgggtaactggtagaggagtgtggcagaatgtgtggactagggacatgaagtaaacttgtaaacttgcccagcaaaacataagactcacttgaggttaaagggcatgaatgtaagggaagtctacttagcatggttttatgtttttcttccatcatgttcagttgcgtaggtacacacatggagtataaatagtactgcattttaacaggatggttaggccaaagaaattgaggatgtatgaataaagcggtatggtgatgtaccatggaatttatgctgtgcaaagagggaaggaagacaggtaataggtaagaaccactgaaacaactgatttcatcaatgaattgtagctctcttcaaggtagaaaaattattgcaatctggaacctctgataatgagcatgtcaacactggaatgtctgaaattgcagtatttgcatgagttgcagttatgaaaacaagatccaaattttactgatttcatagtattttgtctttttctctcgattagaatgcagaatatgttagggcaggtatttttgtccctcctccccatctgctgcattctcagtgcttgattgattcagagaagctgcacaatggatctttgctgaaatctttgttgaaagatgaatgaagagtgtatgactatgggaaataatggctgaaattgggtagatgaagagttcataattctaggagactgggcttaagaacgggggaggtatgagagagaatttgaataaatcaggaaacaaaatttttaaaaattgagaaggtgtgagggacatgatggacaactacaaagatgaggagcggttggtgtgatctgatgttacgagtttcaaagctgtgggtggattacagaggtaggaggcagaataatctgaaaaataaagaagcagcctgaagaaaatctatgctgcctacaagtgcaaggagaatagggggatcggagagaaaacagctgccatttgagagaatcgtgggagaagctgtgacttcaagcaggagccagatttcagctagagctcatggagaagaacatttacaaaggagaagttgagatattgcagataactgatctgaaatttcagaggagagaatgaaatggttttagaaattcagcaggaaattggggattcttagataatgaattctttcataactcttgaatttgacgagattaagctctggatgaatgattactaaaatgacctatatattttctaatacaattttataattattttcagtgattaaagataaattttatcagtgcattgcctttgatatttattttagatggaattaatcatacatcattttctgtggtgtatttctttaaataattatagactatagatgtaaaatgatatagttcataggacaattttaatagattatagctatagaatgctatgaagatacagtttagaaaacattttaggccagacacagtggctcacatctgtaaatctcagcactttgggaggccaaggtgggtggatcacctgaggttaggagtttgagaccagcctggccaacatagtgaaaccccatctctactaaaaatacaaaaattagctgggcatggtggcaggtgccggtaatctctgctgtttgggaggctgaggcaggagaatcacttgaacgcaggaggcggaggttacagtgagctgggatcgtgccactgtactccaacctgggtgacagaggagacgccgttgcaaaaataaaaaaaaagaaaatattttaaacctttataataatatatatgattacatataggtgtatgaatatataattcatagttaatctctatattacattattacatagttaattactttttttttttttgagatggagtcttgttcctggagtgcagtggcgtgctcttggttcactgcaacctctgcctctcaggttcaagcgattttcctgcttcagcctcctgagtagctgggactacaggcatgtgccatcatgcccggctgatttttgtattttttgtagagatggggtttcaccatgttggtcaggctggtctcgaactcctgaccttgtgatctgcctgccttggcctcccaaagtgctgggattacaggcctgagccaccgcaaccggccacatagttaatttccatgtatacaattaatagttatttctatatccacactacaaaagaggtaaatacaagtataaaattttaaaaatgtctgttctatgcaatgacatttaaaattcttgttgattatagtttttggtcttagtgcagtcagtttccacttcataaatactgtcttgcctagcttgtgatggttcacaagttttacatgccccacataatgaatcattgatattttcttagtacattgggcaacttttgaagcttttgcataacttttatttttatgtattatcagaaagagcaggttactggtttagtggtgccctagtgatattgaaattatttttatttaagcctttattctctccactgggaaatcttcttaaatttagttttgattgtgtcttcattgtcttctgtattgttcacatgacatgatagtaataatgataatacttacatagcacttattctaggcctgtaaatctaagcactatacagatgttaacttgttcaagtcacatatcaagtacatgtgataggttctattattatcttcccccacccttatataaatagaggagaaaactgagacatagagtgagtaacttggttaaggtcacaaattgttatatgtcagaactaggattcaaaccctagggtcacactgcagagactatacctttaactatactgtctctatagggtacatagctggtaaatattttgtagtaaatgatggtgaaagaaaggactcttattgatcttttctcttaataaatatttagcaggcacctacagtgtcaaatgctctgttttacatttaataaaacagaaatggcttcatgaagcctggaatcaagtgagagaaacagaaatataatttgcacgtgcaattgcaatattgtaagtactaagaacaaaaagaatgaggtattataacacgcccttctttggactgtgtgggtaggccctttttgaggaattggtatttaagacttgaacaatgatgagaaggaggcagccaggtcatgaataagagaagagttcctagcagaagaaatagtatttaagaagaacaggatttctggagcttatagaaagggtgcccttattttgtctttcacttgaatccaaacaggaaacagatgacataccaaaaagtaaaatattttatggggattcatttataaagaaagctggatacaggcattatttaagggatggtgtagaaacttggggtgagcgttagaagagctagtatgtactaccccagggcctgaaggagaagcaagttgttggagctgagaaggaragggttatagagggcagacttccttatgagagccttatgaatctcttcagttgagggtcacactcagctagagcaaatccaaataaagggaaacaggaaaatagattcctgaccctgctttaccttctgccctttcatctcctaatgaggctgatcatctattgcctaaacacaaagggaaagggtatgagagcccactgattaacccattcagttcagtctccygggacggagtgtaragcgcaaggtcaaagaggttttggatatccattaraatttttggccgctgaacgatcatgctatgcctttagttcatgttatagaatcttttattttaggcaaaatggggaatctttgaagtggtgtgcttttggaacagggagattataatacttttatgaggtggattttgctttgaaaatggcacacattgtagaggcaattgcacaaatggagtggggagatacaaagttatttggtagtttatatggtggctttgattacagatgcttctcaacttacgatggggttacatcccataaagccaccataaattgaaagtatcctaattcgaaaatacatttaatccacctaacctgccaaacatcatagcttagcctagcctaccttaaatgtgctcagacacttatattagtttacagttagcaaaatcatctaacacgaagcctattttataataaagtttgagtatctcatgtaatttattgaatactgaactgaaattgaaaaacagaatgttgtataggtacttgaagtacgacttctactgagtgtgtattgkttttgctttatattatatagaaaaatcttaagtcaaaccatcgtaagtcggggaccatctgtagtgtggttgcaaatctgtttaaaaggtataaataacaggacttgattatagattttatgaatagcttggattgaaaggtcacagtgactctcgtgtatctgactcacataagtagataggtgttggtgccacaaactgccacagaaaaaaaattctatgaacagaatgagttaaggatgttgaccaataatttagttttacacatgaaatattcaagtggaagtgtcagcaggttgaatatacagatttaaactggtgtgatccagaggcatacatttgggagccctctgcaactagatttaaagttatgtaatcatgatatcatttaagctaagagtgcattgagggactagaaagaagaaacgactaaaccttgtaaaacttacacattcagagaaggctagttagagaagaagtcagcaaaggaatccaatgttaggactaagctcgcacttgtgttatcccacttagattataataattctgtgaggkgggtattataatattttgaatcaggatctgagaatcagattaatcatcctggctttgatttttgcctcactccaaaaccatgcatttttcatgacaccaggttgtctgttacaaattataaatacttgtggaagtcaacatcttcctagaatagtgatagaaagcaagcattaaaaaaaacataatatgaataagggaagtagttttaaacactgcttaatttgtaaattacttctgtgatgtataaattaaattataattgactatccttgttttccagagttagttggaatgatatggttttaaatcttttaaataggctaactcatgtaactaaaacaaattttaaaataaatttttccacagaggtgccaccaatttggttttacctcctaatggataaaagcttaatttcagccctgatctggatctatgaagagctttggtacttacttccaacagcttgttcctaagaactgagtgtgtaatttattaatagagactagagagtaggtgtttgaaatgtacagttgaaaacaagtcttgacatttaaacttcatcacataaaaatatgaaatccattattttctactaggatattaacaatagagttttaaacatcttttgtaatagcacagtttcataactagtccattaactacatgataactgtcatgaactcaaataagtgtccataatgatcagtgagtgcttccacttaagtgtccatatacttaggagggtgaagcacctttcagttggtaataatacagtgactataataagttctgagcagaaaatattaatgaatctgtggctttgtcttgatttgaggtattaggatagaaaatatcatctcaaacttttcaaagttggttacatttctagacattataatttgccatgtgaaaatcatctatgcattattaatatcttacttatattttaatcttataaaggctaaatatatatctttatataaggatatatagataggatagttatcctatagatatccatataaagatacatagataggactgtttctatttacacatttcatgatattagacttccagcatgtttgtgtagcagacagtatttgggctgaaaagagcaaatttgtttccaataaatactatatctttctacttaacataggatgataagtagaattattacatgaaatatttgcttggagtatggacagaatttgtactttaaatttgcattgaaagatttttatatattcatttgtaaatttagcattaattttttttggattgtagtttaactttcgccataacttctaaaatctccattcattcattcatttattcattcattcattcattctgccttctatgtgccagatattcttctacctctgaataatatagttttttattaaaaaacagctaaagcctcctctctcatgaagcttacagtaatgaagaatgagaaataatataagtaaataaattttaatgttgctattataaatgttttcccagaaaaaatgaaatgatacagytgagtgacaatttatattattctaataatttaagcttcttaaaatttgatctagctgatacagttgaaactcggcatttgttatgtatataagctgcatcccaaaaacaagtgttacatagggaagaataaaaacaatgagatgtttccaaagtattgtcagtttattaattaaatatttttgaattggtattaatacattatagtatgaactgcttattacaatttttttatttctaaaacagaggctgattttattaaataacattgagaaaaataatgtaactccactaatagtaattatgatgcttaatacttacttttggttttgccagaatagatttaaaatattgattgatggcacttttattaaattctaccagatactgaggagttgtaactcttggactaatactttggaagcaaaagatcatttacatttcattaacatttaattatctcagaacatctctgttctaccaatgactaacagattcagaaaaaaacttaaataatcttaactcttacactattcaaaaacacggttttctttgaagtgaaaactacattgattggtttaaaaatgtgtagtacagtggttacaacatgaactttgaaattatactctcttggatataaatttgtgtgccaccacatattaacaatttaagcctcccaaagctccatttacctaatatgtaagatgaatatatttaatagtacttatagattaaagtgatatcatatgaggtaacctatgataacagtgctggacaaaaaataagcttttaataaatggcagcttttatttctgtagttgtttttagtgtttgtatcataattattattctaatataattatatatgatatgaaatttataattgtatataacctgtgtatatatagcaattataatcattttataattttaattattatttgaaaaatactaagaaaatagatattctttttcataatggaatttgtatccataaattagttttaaattatatagggagcatggaatctgctgtcacctgaaaatggtttgtggatgttaatgtcatcagaacctcagttgactgattctttgttgcttttactaacattgtgtttaagcatgtagtttcagtttcttgttggctttcttcactaaattccaagttccttcaggactatgtcttgcttatggtggaattcacaatgtttagtagacttttttcttacatatgaatgaattaatcagatattcatcagcattattttaacattaaaagaaaaccttactacttaatggtggatcaaatgtgcaaagttcttttatgaaaggtacttgtatactatgtcttaaaaaaacaattgtgcgcaaaggaaggaagaaacatgtgatgcaaatttaggcaatgtttgttaaaatagatatgtgaaacctggagcagtggcatgtcccagggactcaggaggctggggcaggatggcaggaggatggcttsagcacaggaatttgaggtcagcctggacaacggagtgagaccccatcttgtagtaaataaataatagataagtgagtaaaatgtgtgtttaaatttttataataccttgcagtgggaagaggaatatgaaacatccaagctagatgtagcataattacttgtaatccttgacactttcattttaaaaaatctaatacgcattctargagttgattctttttttattaaattgaggttgaaaaataaacactcaatttgctttctgattctctttgctttaagcagaatataattcttgtgcttctcttaagttcccaatctatactatcaatgcctaacatatatcaaatgtatgcatatgccaataacagacttaaaaatatcctttagtgaaaaaacccttaacctaaccaattagtaaggaaaaagtaaagaaggacaaaaggaccaattgtgatgaatgtggttatgacagtgcatttgtttgtcggaaagggtaggtagagtaagcattgagatttaagaatttacagaacaaatataatacaaaagggaatttggcacaattcatgtgatgaaagaatacacatttacctgcattttcacccttgtcattgaccacccacaagctttttaccctcaagaagagaataagtcctctgaaatataactgtccactggagagcgcaatgtatgaatggctcatagcaagaaaaagaaaatggtaactataaaattaaattgtagtcatgaaaagcaaatagatggaaactgattcctctcttcaggttagagatagaaacactgcaggatttttttttttagactgagcattcttttctttctttctttttgccccagaatatcataaataaaactactgacttattttctttatgttttctcctgcaagtaggatttttcttttcacatatgagttccaggcctttctgaaacaggggacattaatataagcctaagagaatactggtcaagatagccatttgaaatagaaaccactccctgtttcttgaaattttctcctgttcagaatgccaggccaaactggtcactcctgttcagttttcttcattgatctgttttctcatttcactctgtaaatgtttgttgtttgtaacagacgtcacatttgtctactctctaaccactctgcctggattacctggttattttaatttaaatgctctctagtgaaaactccaaaatctggtctgatttctgtcattgagtttcagaactttatatctgatgtcctgcatggacaaatctaaactgattttagactcaattccataaatttctgcttcctcctgtattctcatttgtggttaataatatcatcatctaatgaatctctgaagctaaaaatttcaatgtaatataggactcttattcccacacctcagtctgtaagtcactacattttgtaggttctgttatagaatatttctcttctaatcagagctgttatgtgtcacagctttaggtcacatatttatcattttcctcccacattgttgaacaatcttctaactgagctgtctggcacttctcttaacctttaggagtccatgatctatactggtatcagttatctactgaaatctggtttggctctgttattcttctgctaagatatctccacatggctccactgaccatcgcctcaacttcaagcccaagtttttccctctttaggaaatgggttctattctacatggccagtaaactctaagacccagcataaaatcatcacttctgttaagaattcttctgtgaagactttctgtgacttcatggtctcagaagactgtgacttccatgaagactttccttacactcctttcttttatgctccattacagaacttaacaggcatattataatttctgtttataaatattccttaataagaaaatattttttgttgaaattatgacttaaattctctatgcataacatagtacctgtttcatagttggcattgattaaatatgaattgaatgattttcttctattgacttaaattaagtctcttagagtggtttttctacaacctctatgatactattggctgctcattttaatgtactctgattttaaatcccataatcatttacccccctctttacccctgctcctacctctatggtcatcctgtcattagattagggacattaaaagaatcttcaggtaggaatatattggtttgaggttaagaatggcagaatcaaatgattattgactgttattttaagccaggttcagtattaaatgcattaagaatttactcaataattcttagaacagaaataatgaatatatttgttttactaattaagaaaaggagaaattgagtaaatggttcaagtttatatggtgatgatggacatagctggaaaccagacacatatcagtccagtgcccaaaatgtcagtataatagacaactcatcaccaatttaaatttgtttctatttgtattgtgacttcacacataattgaattaactgggctcttgctttcctctctggtaccagcctttattccatttcaaggtcatcctcatataattagaactgattacttggcaaataaaggataatattttcacagcttcttttacctgtactacataagcacaaatgtacagtgtttatatgatattaatataatcacaaatagcatgggatttgagaatacagttttgttatcatttttagtagtatttagaagtaaaatagaatatcaaagttctgtgatttaagaacttgaagttccacagttggttctactcatattagccatttaaccttgagcaggtcagtttcatcatctggaaagatgattttcatgatactccaaactataaatgatagtagacctgaaaagtacgaagatttcctaaaagtttgtggaagaattgagaagaaaggcatatctgaaaaaaatcactataaaatgccagtaataataattataggcatataaccatgaaattaattctgtatatagtattaagctaaagatgtcactatttgaatagcatatcctgtgtacatgaagttgaaaacctaggtgaagagatggaacatatttccatctctttccatatatgactaacaattctaaatatcatttgtagtgttcaaagtcataagagctcaacataaccaagtgaaaaaaaacatatatttatgagactaggggaagaacattccaggctgggacaaaattggggagaaattctgagaatgagttagaactgttttaatctttttgtctgaattccttaaagatgggactgttttcttactttataaagataccttaggagcttattaaaattaggcttagttgtcgggaacaacatattcttacactgataaggaaaacttcaggccttttttgcagggagataagacttaaatatcaccacagcaagctgccattttagcattcagtggttaagccaaggggcaaacagctggagcagagctagcagaaaaacagtgggatgtagtttccaaaccacaagtaccttgtgtctaattcttgcattcttcagcatgaagattgttttttttgttgttgttgtttgtttgtttttgagatggagtctgactctgttgccaggctggagtgcagtggtgtgatcttggctcactgcaacctcagcctcccaggtacaagcgattytcctgcctcaacctcccgagtagctgggactacgggcgcgtgccactacacccagctaatttttgtatttttagtagagacagggtttcaccatgttggccaggatggtctctatctgttgacctcatgatccgtctgcctcggcctcccaaagtgctgggattacagacatgagccmccttgcctggccaaatgtttttaatattacaaaaatcagacaaatgaaattcctcatttgtcctcgcatgctcttgttgttcctaaattccttcagttgtctaattatgtcacctttttttcaatcaatcaaattataattgccagtattaagtatctagttgtagtgacagaaaggagtgaaagcagtaaaagatatatgaaacttaatctcctcatttaaaatcatgcaaatgactgaacaatcttacaataagaccatttctatcagaaaagctaggaagtttatattaaaatactgtttttaagatttagattcattcttttatatgaagctaatacaagatagaataaatcattttttttaaaaaaaaagcaaatctcatcagaggcaaaaatcaatagtttcatattcaaataaaaacagtgcttaaaatcagtccattgtaagttgtttgctgttttctaattgtttagaacaacttccttttatctttcccaggtgttttaatgaaatagtgaccaatttctgaaaatgtttttctgtaatataaacgatagccaaatgccttggagaatattttcttttataatttctgtctttataaaaagttagtctttgtaaatttagattgcttaaagtctccaaagttcttagatgagaagaattgattttaacaattctgtatactattaatagtaatgcttcaggctcattataaaaactcaaaaggaaaatagttaacaaattgtaagttgaagtattattacctaataatattattattgctcaaataataatttgattattattgtactttcttctctcaattacccttattttgaatcttcatttctaaatttgccttcctactattattttcagactttttttgttccctctgtcttttaatgattaaatcatcatcaaaggctggagtgcagtggcagcatcactgctcacagcagtccgtaactgggctgaagcaatccttctacctcagcctccccagtagttgggatcacaggcacactccactgttcccagataatatattttattttttgtagagatggggtctcactatgttgccctggctggtctcgaactacaaggcacaagtgatcctcccgcctcagccttcataacttctggattacagacatgagccactgcacctagccaatatttagttttcttgtttgtagcatctatattattacatagcaatgtgttttagttaaaatatcaacttagttaaaaaaatattttgttagtttttctcaaaatagctatagtttcctaattctttaaaattatttaatatatgcctttgatataaatatacttcccttaaaaattgagaaggtatatgtaatataatttccattaacccaaagaggctaaaatgctgctttgaaccttctcagattctctctacttgtaacttacactctgttcttactgtcctgtatgtggtttgccaaaaatattgaccacctaaaccaatttcgctgtatttcaataaaacaaaaccaagttttcgaatcataactccaaagtttgaatcatagctctctcacttaacagctcatgatttaactgccatgagcctcagttttctcaattgtagctaacatcagaaggcttttttttttcttatactttaatttctgggatacatgtgcagaacatgcaggtttgttacataggtatacacgtgccatggtggtttgctgaacccatcaacccgtcatctacattagatatttcttctattgttaacctacccctagcccaccatcccccacctgtgtctatgtgttctcattgttcaattcccacttatgagtgagaacatgcagtgtttggttttcggttcctgtgttagttcgctgagaatgatggtttccaatttcatctgtgtcccttcaaaagacatgaactcatcattttttatggctgcatagtgttccatggtgtatatgtgccacattttctttatccagtctatcactgatgggcatttgggttggttccaagtcttcactattgtgaatagggcttcaataaacatacgtgtgcatgtgtctttataggagaatgatttatagtcctttgggtatatacccagtaatgggattgctgggtcaaatggtatttctggttctagatccttgaggaatctccacactgtcttccacaatggttgaactaatttacactcccaccaacagtgtaaaagcattcctatttctccacatcttgtccagcatctattgtttcctgactttttaatgatcacaccaaaagcaatggcaacaaaagccaaaactgacaaatgggatctaattaaactaaaaagcttctgcacagcaaaagaaactatcatcagagtgagcaggcaacctacagaatgggagaaaatttttgcaatctatccatctgacaaagggctaatatccagaatctacaaggaacttaaacaaattaatgagaaaaaaacaaccccatcaaaaaatgggcaaaggatatgaacagacgcttctcaaaagaagatatttatgtggccaacaaacatgtgagaaaaagctcatgatcactggtcattaaggaaatgcaaattaaaaccacaatgagatatcatctcatgccagttagaatagcgatcaaaaggcttttttatgagagataagtgggagaaataacacaaaaatatcatcccagtgcacctctgatataataattcttattacatgttagatgatgttattaattacaatatttgccaattttaacataagttgggacaatgttttaccagcacagttttttcccctgaagaaatcaaggctcattagacttttgctataatggaatttatattagctaaaataaaattacaattagactggtgaatatagtttccagaaagtatataatttaaattgctaacataaaagactgatttttcttaaagtcagatcttatttatatatttgttacatcttatatatcctgccttttatgaattttaaattttgtagctattatattttagtaaattgatggtattgtttaagtagaaatgaagaaaatatataatagtttttaaagctttacctaaaatatacaagtcttggcaggaatacatactattccccatttatttatttatcattgtattaaatctttttgctgacagcataggggaaattatgatgatttaaagagtgagtatcagtatttgacagagaaggaaaatgatgataacatacaagcagttatttataacaaaatttaactttaaagtggcaattgcttcatatttgatttatgcatttatcctaggtggtagaacagacttcccctgtccaaggagtgacctttaaaggtggctattgcaatatgaaaatatacattttgagagtacagtgattatggaaatgcagaagaaaaaatagttgtgtggcatgttttgcagattttttttctttttgcctcactaacttaaatggtggtttgtgattttcggtattgactttttgaattatcatttaaccttttcatattcagtaattggcaccaaccagtttttctttgctgccccatcttctaccagaaacagccacactacctaaagtctaaataaaacacaaataaatatgatccagaaacacagctaatagagaattctggactttgtgttccaatgctttggtggactcagtttgatttagaactttgtctttagcaatgcagttttagaaatttgattttattcagttactcatggatactctgggttataattcatttactccaaccaaactttaaagacttcataatattacttcatttgtgaaccataagtttacctaaagaaatgctgtttagttctttgtctataaaacacacgttccattaaccagtgacatttttttctagtcactggagaaagtaaatttgattaaaattttatctgtgcatctaaatgttgttaaatgcaacttactcattcccaatgggttgtagagaagttttaaaggtaatattaggtcaccttgtctgtttttaaattttattatatgttatcatcattttcaaccagtttccattgttgattgaatcatgccttatctcactggttaatggttgagmaaggatttttagagtctttttgtgttggaattttgttgtccatataatgatttgtatactggacagctaaacatcatagacagatgtctgcttttttttttctaaaacttatgataaactattcttgctgactaaatttatatttggtaagtattttgtataagtcactctcaggcttgatgagaaaacagaaataatacctataatcctctttcttccagattttatgttgtagtacatgtatatacacgttgtgtttctagggcaatttgactttgtaatcactattttttatttattttattttttatttttttgcgagtgagtctcactctgtcactggggctggagtgcagtggggagattttggctcactgcaaactccgactctcaggatcaagtaattctcattccacaacctctcatgcctcagcctcttgagtagctgcgactacagacgcatttcactatgcctggctaatttttgtatgtttaatggagatgaagtttcaccatgttggctaagctggtcttgaactcctggcctcaagtgatctgcctgccttggcctcccaaagtactgggattacaggcgtgagccaccatgcctggcttataatcactatcttttaatgacctactactgatatttcctaaaaacaactaatggtcccctgttttatctctaataatttaatcacttaagaatggtatacagaaactagttgtttttagagatgagtatgaatatgctgctttttttggccattagctgtttatcaacatttaacgaaatgtggatgttcaatttcttaaaataataacataaattttcattacttttcagctcctctattaagagttctgctctgatgctaggcaaaatattacaaactactacatgagggcccacctttcttttagggaacgttgctctattaagtaaagggaaatggtgttatccctcaaatcacttaggagtatacaacctcatagatcctttagcagcatattaaatagaatatatatatatatattttttttttctctaatggtagagaatatctgatctgttcttatgaacatttccctgctctttaatatgcatggggatatattctatgcattaggattaaaagcacaaatgaactacattgtgtaagtaaacttcagaaaaacaaatagacattcattgaacacctactaggtgacagacaactggacaagaaactggagatgccaagatgaataggggtatggtcccttaaagtatgaagctgaaggtacagtggagaaatatagaacacaatttaatcaagtcagtaatcatagttttttctgttattctacttaaaagattaacactcttatagttttcatagattattggtgtcaatgaaactgatattggtgggcaaggggaggccagtgggacctctaccccagctggtgaacaggctcttgacacagtcacaagaaggaattcaaggacaagtcagaaaatagtaaaagtacagagattgttgcaagggaaaaagtacacactcaagaaaagggagtgtgggcgtactcaagagagagagtcacgtgcaagggactttggggctgctatctttatgggtttctttagccaagggatggaatattcatggagattcctagaaaaagctggtgatttctcagaactgtggtgccacccatttttacatcaaatatgagtgctcctggaactgtcatggcgcttgtaggtatgttattgactatgttaatgagcatataggaagatcctaggtgaaacccaggacagatacagtgctawgttgagtccaccagatcttagccagcttggtccatgccctggttttcagggtcttatctgctcctggcttctgcagctatttcggcagtttccttttgctagtcacatgaaactgctgcctggaattttctattctcttgcaaccaccttgtgctactcctgcctcaaaactgtccccataaacttgctccttatcagaagaaaaattaaaatactgtcagaagcaaatattttacttaaatcagtaaaatgattgtccttaaaaacagatttgttgagttcaccttaattagtaattggctgacaatgagtacgaatttagttcatgtttgtttataagccatgtaacatctgtgaattagttttatatgaattgcaatcttttcagaaaagaaataatgtaggctttttctggtttggccttttgttttttttttaaccccccaaggagccmcagtagaaaatgaaaaacatagatctgtaaaggaaatggcattttctaaatactcttttctccctgtataaacacattgattgttagtttttaaattgctttgacttataaagaccttaaaaatctcaaaaatgagtatttacttccctggagatttcttcattgagtttaataaaatccttagtgagattcatacactgcaggtttctttttttttttttttttaacttttctgcttttgaaattacaagctgttactcaccaggtgtatttttattagtttgtgtgattctgagcctgaatatttattttacaagtccatttagcaaactatgaagctttttaaatctgtaagaagaggggcaatactttcattgcaactttgaatgtcaaatgtttaaagggtaattacatgcttgaatcatattcggagtcaggatagtcaggacacacttgctgatttggaactgagaattagttacttcaaaatagagagttattttttacccaaatgtataatattgttaaatagcatcactgaaaattctgtgaaaaactggtctgacatacatacacgcatgcatacatacacatattttgccagttgagccttttcacaagactcagctacctagttttcttattaaattttgctcaaatggcaccaaataagaaatgtcagcatgacttgtataacaacatactttcaacagtttgtatcaaatgatttgcattacactagagtcttggttagattggaaaggtgtttacaataggtaacataaagctaaattcttagaatttgattttaagagtatatatatatataatgagaataaagaaaatatgtttgtaagatttgtcttagcaaattttataattaatagtaagtaatagtgcagcaagagaaagctatatagtatctttataaatcaaaagtatgattatttatcttatatgaccacatagcctactccagctattgccccatctctttgaaatactctaaagctaaactccttgagagagtgcacactttccattttctcacaccatttgcttcccaggcaagtgatttccgtatctctaaattcagcaggcacattttagtctgccttttacatggacctagcaaaactggaaacactcacatttgccatcttaaacacttctttttctttggcttctgtgattccatattttcctctctcttctgcttgttccgatgatttttctcaatctgcttttatacccactttctacccatctagccttgtctgcccagagtttaaaagttggagctttttacggtggtgttctaagtctgagaaggcaaaccttttggtaaagggacaaatagtaattatctcaggctttgcataacatatggtgcctggtgcacgtttgctgttgtagcatgaaaggagccgtatacaataggtaaataaatagctgaggtttctagatatgttattctgcttctcagtttctttatatcaaaataattttgtatggacttctaccaaaattcttttctatttcttacatttaaaggaaattagttttacatttccctaggatatttttgtagctttatatctctagaccgtcccactatgtacaaatagatcgacttgtactttgagtagcttcctcctctacttctcccaagtatctatcttggcttttttgtattctgttcttactgtttctgttcaggtcactttarattgtactccctcccaggagttactttctagtgtgggactttggctaaaaagagagctaggttttttagttttgagattttacagggttgagggtctcctattttctgactttactatggtccctttgcatttacccacaaatttgaatatgcaaaatttctgkgggtttttttttttttttttttttttttgagacggagtctccctctgtcgcccagactggagtgcagcagcgcgatctcggctcactgcaagctccgcctcccgggttcacgccattctcctgcctcaccctccctagtagctgggactacaggcgcctgccaccacgcctggcaacttttttttttgtatttttagtagagacggggtttcaccgtgttagccaggatggtctccatctcctgacctagtaacccgcccgccttggcctcccaaagtgctgggattacaggcgtgagccactgctcctggcctctctctgttttatctgctattctcarattgtctcactgkgcttcccataattctctgatcagatggactctaagggccatcagaagcctgaatgccttctgctctctttgcataattgcagataccttccagattttgtagctatcagtgatttttattcactcactggttttttagagctcataacgatttggagtttataactgatacttgtagaagcctagagatcttttggtttggctatcctgtttttagaggaatatttgggaagactcaaaactattccatttctgcattttccaataatcctgtcatagacgttacctagtatatttattttttaaggtggagaatgtaaatgccctagtattctatatcattgtatttttatttatttatttagccattcattcactgattgattcttttattcattcaaaaatgacattcatttattgagtatctattacattacaggtacttgacaaaatgtgattcagaaacagaatgttccagatatcatgtcaggtgctttaacaaagaatatcccatttacccttcagaataatacagtttcctgaaagtaattatgttgccaaagtttacagacagcttcagtaccaggtcttcgagttgattgtacaattgaatgaaatatgttgcttaagcagttgtttgatgtttacaattggtcactaggctaggcacttggaacagaaatatgtgccagctctttttgtttgtttgtttttgagacacagtctcgctctgttgcccaggctggagagcagtggctcaatctcggctcactgcaagctctgcctccagggttcacgccattctcctgcctcagcctcccgagtagctgggactacaggcgcccgccaccacgcctggctaattttgtgtatttttagtagagacggggtttcaccatgttagccagtatggtcttgatcttctgacctcgtgatccgcccgcctcggcctcccgaagtgctgggattacaggcgtgagccaccgagcccaggctgtgccagccttttgtgtgtgtgtgtgtgtgtgtgtgtgtgtgtgtgtgtgtgtgtgtgtgatgtttacctattctctatattaaaaactttactatggacgagccccactattacttttggcaggaattaaagcagatattgaaaggctaaagcaaatattaaatatttcacatgctcacacagagatacataaaaaaataggtgagatcattgctattgaaggcttaacattaatctttacttttaaacaatttaggataggaaatcaattcaggttgcactgcaaggaagaaatattaactggtctaccagttgagcattgtattgttattactatagagtatttttggattagatgtaattgctactgaagttaatcatttattatacacacacttagatttcttctcatcagcataccatctgcatttaagggtgctctaatgccatgctactcaaaatgtggtcaatggaccagcagcatccaaatcacttgagacctagaaatggagaatcttggatctactgaatcagaatctgtatttaacaaaatcaccaggttatcttatgcatctgaaatattgaggaacattgttctaatgtgtcagtgcttagattcatcaggaataggaagaaaataaataacattaactaccaaattctttttttttacttagctacactgagaataattaactgccacattttaaatacattattaatatattttaaaaatagatatctagaacctattaatatttgaatatttgtgtgaattttttatttagcattttaaaaattatatgcaatattttccacctagctcaatgttttggcagagctttgttagtataggcattagacatcatttgggctgagcacagtggttcacgcctgtaatcccagctcttggggaggtcaaagtgggaggatcatttgagcccaggaatttaagaccagaccggacaacatagtggaaccccattaatacaaaaaacaaaaaaacaacaaagaaaaaggaatcattttgtattactttaatagtagtaaaactcatttgatttaaagagaatttttttaaagaactatattgtttacacttagcacagacagccactaaataaggttgtgcagtgctcaaggaggggactatgggcagctttgtcacatytatacctacactggctcatagctagaatgtaagcactataagtacagggatctcttttctccatatacattaatgatagaatactgccaggcaaatagtagttcaataaatatcactgaaactttttttttctttgtatgtgaagagtcacagatgacattgtaaaatgatacaggaaggcagcacacattaaaaaaataaatcaatgggaatgatactttgcataacttatatttttaaaactcagatgctttgctttgacttgagcaaatcctattaatcacattaattacagtttcacagatgaggagatggagactgtagttaaatgacttgagtatcatatgtcttgactataatatgccttgattgtaacataacatacaaactagaatgtgttgacactaatatttctttttctttctttctgtttttttttttttttttttgagacggagtcttgctttgtcgcccaggctggagtgcagtggtgagatctcagctcactgcaacctttgcctcctgggttcaagcaattctcctgcctcagcctccagagtagctgggattataggtgcccgccaccacactgggctaattttttgtatttttagtagagatggggttttgccgtgttagccaggctggtcacgaactcctgacctcaggtgatgcgcccgcctcggcctcccaaaatgttgggattacaggcgtgagccaccgtggccagcctaatattccatttttatgaatactttacatcttctccctttagtgagagttgcgataattagcctatttgcaagatagcagggaggattaagtgtatatactgtaattgagaaaaacatactcatggctcatccatgttaatggcttgcccttgtttccatcatcttctgtctgattattgtactctagaggcaaccaggtattcaagtgtgtggcaactgtggccttcgatgtgtatttggagtcagtctgtaccttgaccttgattactctaaatgaggagaaagctatgacttaatggcaagtacattggcctgaaaattaaagacctgggtctaattaccctgataattgaagatctggcttacatcccagttctgttactgatgctgcattgaatttagtcttttcacttaatctttttcaccattgtttcttttttgatggaatgaggaaaattctagctaccttacatggttattgttattaaatttgaatgaaactcatttgaggtatattcttttaggaagactgatgaaaacagaatttccaaagtccctaggtgttgaaaacgcttttctttatcattgatatgtagtgaattttctcgtttgttctcttgcttcgtatattggttttgaaaagcctgctgctaatctgattatctcatcttagtaaattatttgccacttttgccgggaggccttgatgattttatctttaactttgaaatctaattgttttaataggatatgtttcagagtaattttctgagttaattttcctcaggtgaacctttttaagtttagattgttgtcttgttctttctctgaaaggcttccttaagctttacacttgtaaacattagctttgttgcattgttttatttttcttacatcaagttaatattttataatttaaatactagttctttttgcctgtcttccatttccattactttctctctgacccttttacttttttatatctttttcgtttttaggggcttctttcttgcctttcttcaatgaggctttgtgaattttcattcgagttttttctcatttggacattttataatgtattcttcatttcagtgataattttgtttttttcttctatttctttcctgaggtcaatcagctcttttccatttgtccgttttttccacttttgtttgtaaattttgaatttctgattcgatagtttttaaaaatatcatgtgtcttatttgcgtatatttaatcctgcattgtgttttaacttaattttcttctgctttgtggttgctttgtatgaaggaattatcagttggtatgtgtggaatttagcttcctacttttctgcaacagctgtgtaaggacttttcttcacttttatctactggggttttatacaacagtgctagtttagttgttccttcttctttcaatatagcaaatctaggtactttagaggatctttgttatggtagtggggaaaggattgttaaccctccagttttatgatttgcattttatcttgcaagaccctaaattttattttcttattgtctcttctttatcatccagtagcctgtacttctctcaccattttttctcttttctgttttctaagagctcatctttaaattgcatctactgtatctctttaaatcatgtctgccttgaaaattatgtttgtctctttaaaagggatgggaccttttaaattgtgcttacttagaaatttctttcccgttgtccctgctctgatctgcacagatatcttttcattcttttcagatataaggtggattttatttttctagttattgttgtaagtcactccttcttttgttttccccattgtttgcctgtgagtagggatggggctgggggttgcagcaggagacatgatgctctgggatttcctgattttcctcttttcactcatagttatgcagttttgatattctctatataagatatgcttgaataatttacatagaatttaacttttaatttaatttacatagtatttaattttcctagttttttcttaaatgtagaatttgattttctttctcttttttcttatttgcaggggatattatgggagataaatagttatattgttgccattgccctcagctatcctgaaagtatttttaaaaagtttttacttgaaaaacttggcttctgttgttttactgcttgacaactttgatttacattttctcagatttgtttctctcataaactttagattgagtgcacagtgtattattttgtagcatgatatactgtattttataacaaccttaacggctagctcatttaagataatattctagcatgtttataaaacaaaattaatccattgatggattatttgcttgttctgtaattgaaatatttgaaatatttaccttatgaaatctctagattgtctccacgagagttaatttttcttcagaaataatgaaatgctatcttaattataatgagaaatataatggtgaggactttgtgaactgaatcattcaagtataaaatattttaaattatttttccagtttttgcattatgtgaattactttggcatctgatatttttgtaaatattaataaaataaaaaaattatcttgcataaagttgctgacaaataatttctttgtatggatgtttctgcaagtgacaaaatccatgaaagaactgaaaatgcagtataatttctatcataacttttttcaatcaacttttcatatctaaataatttcagaaaattataaaggtacgtaaacttattatatcacaattttgttttaaatattttagatactgttttgcaatatagtggctttcttttataatcctaggtattttattttatgcatgcaaacacataattctaagaatgggtccataggttttacaaaactaacaaatgagtgtaggtcatgaaaatgtttaagaaccccttccctagaatatagtcctaaggaagacagggattcactgatgcagcctaagtgcctgaaacattctctggaatataggaggctctcagtgcatatattctagattaaactcagactttcctagcaaaatctttmgtgacttttttatgtgataaaataccctgttgtaagctctcataagaccaaatactgctcatttttagctcttgtggcaattacacgtttacattcattgttattakaatttgattgtgagccactggaatacagactctaattgggtagggatcttaccacttttgcatgcattttctgagccccacacagagtctggcaaataaatgtttgttgaatgaactataaattatattgagacacaaaataagtaagatttactttctgtctcaaagttttgtagggactgtgagaactgtaaaatattgtagcaaaaggtagtaccccagcaaacaatcatccaaccgactggctaaatgaataaataaaacttataagaaagtacaaatacattgttatgggaattgaaggtattaagtgatcactttttgtgtagaggtcagtgtgtggtttatataagtagtagtaatttacttgaatgtagaaggagaggttggatttctaacacatttatagagacccttctattctaagaaaggggaataaaagcaaaagcatggaaatggcaagaaacagggcaatttcagacactgaccataagttatctataaggaacggagcaaattagtttgtgcagttagattttgagtaatttcagtataaacctgggtgctaaggcaaggttttggactaagcttctttggtagctaatgctaccctgtttacagtttttgaaaagtgaaatattcaatgcaaactattagggagattcaacttaacatagaaaaataatactgtgaaatagatttttctagtaaaataagtataaaacacatatttcagattaataagagttcttaaattcaataacatattttgtgtttattaaaaacaccatagataaattttgtgtggatacagagaaataaaactagataaggcctattataaaaattttacctctaagaggtaagatctgcatttttacttatgtcatgtgtggataatgggattaatactcaatttatctccagaggaaggtcagcatgcctgttcaatagcattatatatttcaaaactgtaatagacaacagcagaacctttgcttgcaaattattttatttttatgtagttaatattttgatgacatgagagaaaatgcccatggagaagagaccaaagaaagccacttccacttaattgatatatttgtattaatttctagatttaaatctaggtgtgaggttacagagtaacatggcagagagcttaggaaatcatggactttcagccagacctgggtttcaacacctactgggttgcttcccagctcttgagtcttaggcaagttgcataactaataagagctttagtttccatatatgtaaagcaaaaacaacaaaaatgggaatcacatgacatgatgcatagtgcatagcacagtggttgtttagtaagcaatcaataaaattgttttatgattaaaatattatgatcatgcatgatagaggtccaaactatgaaatactcctctctttattttctaaaatcctacatttaaaattttcactaagttcactatttgaaattccaccatttattgattcattagrtaagaaaatttctttgctactgtaaccattagacagttgtagatactggctttacttctttcatcctggcctgatgctgtggctaggcaagtaaagaagaaaatgaagagggtaaaaagaaagtaattggaagaaaaggatgtagaaattgctgagtatcaaagcaagaagacagagaacgacatgagtaaaataaagacattgaagaaagtctgagaaaaaagccaaatgtaagagagaatgaatactctctctaccattcgctactgctcattaagattataataataacagtgttgataagttaaattttttgccttcaaagtcagcttttctctgccttgctacaagatactgagaaaatgtggagagccccgatttagctgttggccttcaaatcttatcccaaactctataaagtgactgatctggagcaagttacttaacaactatgaatgtgagtttaccaatttgtaacacggtgaaagttagcaaaggaattaaatccaggaatgacacatagcaaactataccactataccacacacaggaagtcttctttatatgttagctgctatgtataaatatatgtagtgttctctcctgttctctctcactctctctcaatatatgtatatagcagctaatatctgtatgcatatatatttgatttataaatgttatgatgttatgttatttataaatgttatgatgttatgtttgaaaatagtttgaaactgttttcaaaactggcacttttattttgtggatacaaataaatgtttttctgtcatcctactgccacaaattcttttcctgaaaatggtttaaaatgtattcaacaacagcattatatatctaatgaaacttgtcacttaatttcttcaagttcttcattccatattatttatttcttaaaaatttgagaatcagatacttatcaatttactttttagtttagtatgatttcataaaattgtaacatttataaattattatataatttgcttagtaatagtcatacgactcaatatttcaatcagattttataacaatttgtttgaaactttgaattgtgataaaagaacttttcagagataaattcagattaaaaagcaaaaaaatttaaaagccttttgatggggagtaccagttacttgtccaaattgagagaaaaagaaacagtcatcaaaatgaccaagagtaatatagcctcagatttctctttgttacctgatgacactatttaagatggactgtcagatcccattaggtttgcggataatattctgcagatgagatgaaaatggagttttcgctcagcaggaggaaagtgagaagtacacttattctagtcaggctcagagatgttattctttttctgttgttgctatgggataacattgcatcaataacaggaaagcgatccaactaagcttcatgcaccgcaatcaagttgttttgatgcaaataaggttcagtcacttagggtactcagttatgacaaactgtgctaacaaactataaatcaaacctgagctgaattgcaagtgtatatgctagataaaaaagaggaaaagcttttatcttttagtagacttaagagttattttgaataactataaagacctttacaatatttactgcaaaattaaagtataaatgttgttgttgataatttttaaaagtcaatttttattgtcccagaaatcctaatggagtttttattaaaacaatattatgagacaagtaagcctatgttatatttgggatagtatgtttttctagcatacataaacaaacctctgatcatagctctttttccctttcattttgaaattgtagttggtctggagaatgaggaaaaggaatttactaaaattatttgctctttaaaaagttatgcttatgtattatacatattcacatttaattcaaaatccttattttttaaaattttattcatagaaacattggcatttaggrcccatatatttacctgactgacatttgctggtaatacatgtctgtcaaactaaagtattagaaactgaatagattttgaactaggagttcacatgcaattgcccatgtttcatactgttgtatcatttgttcacatttcctttagtggttgtggaatagaaattataatagccatatatagagagaccttacatggagccgaaagaatatatatcaacctaaaaacacactgagttactataagaatcttagccatgtgtatctaaattttcatttttcactgccaggtgcaatttgagaatgaatctttcctacataagaagacattgtaaatatgcaggtgggccctaaatcctgcatttgtagagcagtcatactgtgctagcttgtagtcataaatgtttctagatcagaattagatttggaaatttagcaaccaatgaaaataagcatttcaaaaccttgtgggtgattgttttttgtttgtttttaattaagtctgaagagagtgcacagaatgtcacacagtaaatagatgctgtcatctttcattaccaggcaccccatgacagagtccattgcagcagagctgaggaccttcatatcacaaaatgagtttgcttatcaggcatagagtgaaatgtttctgtatctcacaagaatgtctgatattatgcttctttaactgcacctgtaagcctgttcactgcaatttaaagacagtatcatatgtaacttgaagtcattttcaactggccatttgctcactcttagaatgagttttctaattaataaatatttttgaagacatggtgaataattggtcagatatagttaggattagtattaaaccctcggatctgaaattgtgatgaaagggtctgagatttcaccctgcatctcagctaatgagtgagcctgtcacagttttacagatattgacagaaagatatgaggcatctgtgtcagagacaagagtttcttccagtaaaagcagcagtcgaagtaacattgtaatgctgttccctgagccccaattcccaggggactaccggatgagggccaggtgatgcctgcacgtgtgaggggtatactacagaagaaccgtgagattagaagactgttttttatagaagctattggaatcctttgtcgtggagaaaaacgttatctttattaccctgtgcaaaattaggaaacagtccagaggatcatcctcacatttgagctcagttgtaagtccaggtgtcccccaaaccaccttaagtatttataattcactgcctggatgaatagaactcactgaaagctgttatatgcgtggttatgacttattatgtcaaaagaatacagattaaaatcagccaaaggaagagatgcatgtggcagagtctaggaaagttcctagcgtgaaacttctgattctcctctcccagtggagttacggacaacactgattttctctgcaaccctgcatgataatatggatggagtattgacaaaccccagaagctcatcaaagctttggtgtccagagtttctgtggaggctctgttatgtaatcatggtctactgcccgtatggctagtcttagtctacagcccctccagtgtgtgagctgaaattgtgactgaagaactccaccccaaatgacatctggtgtgacattttctaccctaattcctattgttagagtatctggtatgatccaagtccctcaggcaagcaaaggcactcccataagtgccttttatgaaattccaaaggcttagagacctagcaaaagccaaggaaaaagacaagacatgaatttgggcgatgttaaattatttattacaattcttagaatgtaagcagatctctctggggaggggaacaagatgtgtttatttttatcatctctgtctttccagagctttctgcttatacaaatatttctgaaaaaaatagtcctggagcaaattggctgttaatgtctagatgtgtagattcatggagaaaagcctgccaacaattagctagtgctttgcatttgataaaactcatcttttgagattccctctttcaaatttctggctctttgggtggactaaagagcacttcttttcaagctgtatttattaaacctagagaaagtgatcacactacttttagtagcttttatgttggtaacagaggaagtctttcgacattgggaaggttttttacttccctcatgcatacatatatgtgacttgaccaaatttagaaggtttttgaagggaacagaaatcacagattacctgsaagcaagcaatttcatgagatggcaccactgaaatttatttcaattttttccctcctaaaaacaaggcgattttcttcaatgactataaggttaacaaaacctaaccatgatttataatttaaatatataatttcatgtgtttcttaaaatgatattccattgctgagagtgacagtctcctctctgcctcgaaaccctaatagttggaaaggagaggacaggtactctgctttctaatcctcctgccttcaatcattactcctcattcctattaatacacttatatttttagccatgactattcctcaccctgcccctcccaaattcactttccctttagatactttcatggatccaaaaggaaaagcgatgcttctttttatccatttggttcaagcatgaatatctttccttgatatctcatagtaaacttcggaacatttaaaaagatttttgtaaaagctaggataactttttcaaactattttccctaaaacatartttcctttaaaacaagaatttcactgtcaaatacatttggaaagtgttgtaaacaatattttcctctagggaaattcaaaatacacattatgcctaaaaggctgtaacaaaatcctgcagcaaaatttagacagaggaacaacaataggtaaaataaatacagagtacagcatgcaaccaacacagtttcttataagatatagtttgtcccttatggcatcagatgtgagtttcaagggctgccttttatgtgaaagagtcatttcttagccttcacacccagaagcattggctgaaatagtttgacagcttaaggtctagacctaagaaagtgaagctcattgaaagaggttatttcctctcctgcttacctaatacttttcttctaagttttttccttttctctgtggatactggtatgactaaatctacctgggaagagtaagtcctcaggctatggcttcgctctgtgaccacaaaggactgccaaattcagtgtaagacaatgacttaataattcttagataaaatgtggtaactagagcaaacaggaagtagtggagctaacagtgttatatttcattgtgtgcagttgatatttcataggtatagcttctgcatatcccagggatcagagatatgctctgccctgaataatggctgaattaattgtttattttcctagatatgacttagtatgtttgactatgcattagtatgctaatggtgtatgtatagaacaactaaagtcaaagtgaggcaatttagtagaaaataatttcaattccttatttatgacaaaatttaagtcacattttaactcagaaaatgagtgacttttaataaaaaaaatttcctataaaagatactgattttctttttactggaaacaatatttttcaacattgtgttctttcttcgagagcttagcatcccctaaatatgagaatcatctacttaaggaacttgaaattcctgagaagacmcaaaacatgtatatataaatatactacaatacatcagcaaatagtcattctttttcaggtttaccttattttttattcattatcaaatctgcttttaactttttatcagaagcagaacactagatttaaaggctttccaaagcctaatgagtaagtccagtgttctctmtgtgaatattgcatacttaaggctgtcatgttttgattaagcataagctttaatagatttgctggaataattattaaaatatttgaagacctacatttcatactggaaaggtcagaaagataaaacatacattagcggataaattcatatgagataagttttagaaaaattaatttcatggtatttatgactttttggagtgatagtttgttgatgcctattgttdatgcsaatacaatgtgacacaattaaataaaataaaataaaaaaaagaaaaaaaaaggtgaagaatagttgtgtattttataaagatttttttaatctttatactcttgatttactcttttgaaactgtttctattagaaatgcctgatgccacatttttaaacaaagtgtctatttcttcacaatttgtatccaggaaaacatcatttctattaatatgccagtgccagagagaaacatattaatacactttcactttcatttttatactgacattttatttttagtcttgcagtctaatttttttttctacctgaactgtcttatggactaggtaaacttaaacacgtatcattcctgagaaaggagaaaaaaatgaaaacatactctatgtcttatcctttcaaaaactttaaaagttggaattctgaattcgagaaagcattcagaaaataacattctaaggaaaatatcctagttctttctctaaaatacacctctgctaaatattatcagatatattttcactgatcttaacttcgaaaatgatttcaaattaaggatgacttgctagacataagataatttggctctaatttttttgtacctttacaaattgacttcaattcagaggaaaatgatttgtgaaaagtctactttatgccatttgatttatataacagtggcaaaatatgcctaactggtatgtgagtaaaagatatatttgctaagttattatttgctaaacaaatctccaaataaatagggccatcttttagaaaacgtataattgatgttttagctaaaattttactcaaatgaggtaatgagcaaggctaagcctcacgttggtattgagtgtgtattcttacatctctgaaagtgaggaatggacaagggcaatcattctgggatgctatttgcattatagaccagaaaaaaaaaattataatgacttttaagagggccaagtctggatttgttagaaaacaaaactctggtagtgtgtaggactcttacgcagctaaaggaaaagtaaggtggattaatttattagcagtcacttgctccactccaggttcaggcttcaacagtacatcccaatcagccctttaaagtgccccttatctgtgcaccactcatccttcagccccacattcaatctttagggcctacttgtctgttgcacatgagcatacacacacatatcccagctggcacaagtaatgttatcttcactgacaatttcaaaggacgcaaggaaaggggagcctggcacctgggtagagcctctgggactcatgactccgagggtggctagagaacagatacaccaaacatcgtgaaggtgcctagaaactctaagactctaggtccttggattgtagggcttcagcctagtatgaygtgtctcctagtgagtggtaggacctgggaaactcctattggtatttgtgtcatgctaagcagaattgacttagaaaagttagttacaataacatcttataagcaaggtttatcatttaaagawatatatatatatatatatayacacacacacacagacatatatacacacacatacacacacatactagcatattctttatcaataagtgattactctgtactattttcaaacttcagwatatcaaagttcaaaagaatcgtttgaaagagtgagggtaagaggttttaatatgtagttttctgagccttgttcttagactctgaatcaagattgagttggtttgttctggaaaccaagaatttgctagccaaacaaacatccatgctggattgaataacaacagtcttaggaacacactttacaaagcatgaccccactgtaattgtacctatcaacatttattttgcagtatataatatgtgatgcccaaccacaatagtgtgagcatttttcactaatcatccactgctgtttccttcactgcattctttctgtaatgcttcatttaacaaatgttagttggccatgatttagcaaaacatgatgtctacccattaataacctgtatcataatatgagaacatttcattcacttaatgtttgctaagtgtctataatacagaaagatttacagtgaaactcctctttcaacaaactttatcaggaaaattgtcacatctagaaacactcacaagaaaatgaagaaagtaagaagtgccataagagaagtcacgataaaagtttttcccagaaggggattgctttaagcttagggtagtcatgaaaatagagtatttcaggtgatcattcatggcactgtttaaatatgagtcaggctgtgaaactcagggcaaggagagaagcagtggcagatgaagggaaggtttagggtatgcacagggaactgtgtaccatatgcgtatatagaacacatttggatatcacataggataagtgaatagcaataaggtaaatttggagcttggtaagagaaccttttgaatgccaaataaataaataaggactataagccttactgtgtagatgaggaaatgccagtaagggttggggtaccagggcagtatatcatgaagatgttccaggtaagtttgtgatgagttgaagtgaaggaaactgttctataggagaccacagagactagataagatgtaaaaatgcctgaatttaagtacataataaaaggaaaataatgtaaggaaaatttaaacaattatattgaataagtcttggtaactactggacatgggggaaaggaaagagtcaaaaaacaatgyccagaatttgaaagctgggcaactaagattattgtggtgacaagaacaaaaaaaaattcttttattattatcaaaaccttgcattagatcctttgtaaatatttaaattaatcttcctcccatcttagaatttggaaagcagggaagggggtcccaggggaagagtagccagtggacagttgaggagagcaaggggtakttataaagagattcttgatatgtcttcctgtatcacagggcgtgctaaactttctttttcaagggcggatgtgtgtgtgtttacagcatactcaaagtaatgtttacccttgaagcacattatttattgatatatttacatttattgaacatggaaattctctaagaggaaaataaataacttaggtacttgactttcatgaaatttattttctttatttacttagtaatcctattagttcctgttttgtttgagattctatagtattgtttcatttagccaaatatttcaagacaactttttggcagaagaacttttcatttatttgcatttctttcacaattttattttctaatccatttaaactatcacaaattaatatagaaaaatatattattgaggcaaacaagtttttgtgaaataaattgaaacccaaaaggatgaagaatgtcattgacataaaagtgtaattgttcttcaatgtaaccttacaagtatagatataatatatcataattgaaaaagaaggaagagggaaaactaacatccaaaccacttgaatgaagtaagtttttacacagcaaaaatatatacgacttttatttgtcaagtatactttaataatgctgggggtgggtggaattaattagcagtaagttggggggaaaagtagattacgtggtggccattgtagtagttgagagcccttcataaatgattgttaacatcgttctagttgcaaatattatctgaatatgaaattcatgctaccgtcattctgaatacttttattcttgagtttattttattaagacattaatattgttttcatgatcatcatcataagtgtgaccatctcccctctattctacctagcactatttttcttctaggaagtgcatgtggtgtttcagcatattttacattactttggttacaattaagtgaaattttatgtcataaatttatatagtttagaagcttagtttataagatcttgctatggctttctatttctgggaatgatgtttctgacaaaaatgtgtgatagaatgcatgatagttatccatttcattccctatggctcttagtgtaaagtccaaatctcttcacatgttttataaaagccagtaagatctggtacctgctttttactcatgcatagtttttctccctcatatttcatattttgccctccagttttactaaattttagtttgttccctgaaaatgactctggttcttgcttgcaggcctcagagcgcacttttctatcagccacagtactttyttytatgcccagccttccccttcccatyttttgcttggcacctaagcatttttcatgtctcaattggtcccctgtgcatcctttaggtttcactttctctggagaggcttatgaatagcccccaaatacaatgggtggacctcaactctatatccaaagaattttgtgcttctattttcatttcccatgaaaatatacaaaatacttcattaaaaaatataattctctctctctctctctctctctctctctatatatatatatatatatatgtaattacctgtattcttgtctcttatccccactagaccctaagccttgtaaggacagtctttgtctatcttattttccctttgtcttagtctgttcatgctgctgtgacaaaatatctgaagactgggtaacttttaaagagcagacattgattttctcatagctccagaggctggaagtgcaggaccaaagtgctggcaggtttggttgtctgctgagggctattctctgttttcaaagtggcaccttgatgttgcatcctctggagggaaggaaatctgtgtccccacatggagaaaggcagaagggaaagggagctggactcagcattaaagctcttttataaagaccttagccccattcacaagggaggagagctcatggcttaattgcttcttaaaggccccacgacttaatattaatactatcacattggccattaagtttcaacacctgaattttgtaggggacacattgaaatcatagcaccattgtatcctcagcatttaagcatagtggaggtacatgttagttgatgattgttgaatgaatcaattgatgattttcttttttatggttaaactaatgtggtatatactagactcatattccaacacaaacattcataaagattaaaatataaaaatattagattgtagaaatatgatataaatttgaataacatttttagaacaaattttcaacaagaactatgctttatactgtgctacacacttagcttttttagattttatttttatcttttttacccaggctggagtgcagaggcgcaatttcagctcactgcaacctccacttcccgggctcaagcgattctcccacctcagcctcccatgtagctgggaccataagcataacactacacctggctaattttttgtatttttgatggaaatgggtttttgccgtgttgcccaggctgatcttgaactcctgagctcaaacaatccacccaattcagcttcccaaagtgctgggattataggcatgagccactgcgcacagcccacaattaagcttttcaaagctttttgcgtactagtcttgtagaaattatttaacagctctgatttattgataatatcaaggtgtattgtaaggttaattctttattcttaatattgagataatgacctatgctcttaagtttgtatttaacttaaagagtaatctctgaaccagagtgttagctcttaacaattcataaatggtcactaaattaaccattttttttttttttgagacggagtctcgctctgtcatcaggctggagtgcagtggtacaatctcggctcactgcaacctccacctcccgggttcaagagattatcctacctcaggctgccagtagctgagactacaggcacacaccaccacgcctagctaatttttttcatatttttagtagagacggggtttcaccctgttggccaggatggtctcgatctaacctcgtgatctacctgccttggccccacaaagtgctgggattacaggcgtgagccattgcacctggccaacactttttttcaaatataactttaattaaatattggtggtgtgctaatggtttttaataaagtgttaattgaattgtgcttctcatcacaaaatatttgtaaacttcaaaggttcttatgaaactcatagtaactttaagaagaaagaagtaaaagcagaaaaactgataaattacttaatattatttcctgttacatgcattttctggttcttgtttttaataattagatacatattatggctttaatgcattagaactattaatcaggtatctcaaggtgatcacgcctgtgtcttgctagtcatgcactgcccacaagtgctcaataatatttactaactttaccaggttaactacaaatgtgggaaatagttaactcattcattttaattggttataaataatcttattttactttgttatctcaatatctttacttgacgcttactctgcacatttattaattgaatactctattaaagagaaagttattgtacagtgcagagttggatttgcagacaggagttcaactacttattaattcatttaaaccttctgaaatgcattttctcatgtgtaaaatgatttcaaagtgcaatgaaaaaagactgtctcaaggagatactgtttactcaccaacttatcaaatagaataacataatttaaagcattctaaaaccaaagaactctagacgtactaggtattattaccaaaatttgtatttcttttctacatatcacaatgttcaacacagaattaggggtaaaagcagaaaattggagagaacaccatataaataataaaggaactgggtgctgtggctcacacctataatcccagcactttggtaggcagaagtgggaggattattgagcccaggagtttgagaccagcctgggcaacatagaaagactctgcctttacaaaaaaaacacgaatgaatttgctgggcatggtggtatatgcatgttgtcctagctacttggacagctgaggtgggaagatggcttgagcctaggaggtcgaagcctcagggagccatggttttaccactgcactccagtccagcctcggcaacagggcaaagccctgtctcaaaagaaaaaaagaaaaagaagaaatgttcaaataaatgatgttacacccaaaatatgtgataatatgtgattcaatttacctttaaataccgaaaatatttcatgaaattaaaaacactatcataacaattgaggagtatcaattatatatgagtacatctggatgcctacattgttcctcaggttttgtgcatgaaggacagctcatatatgagattatattgctattatattgctacataccagccagctaaatgcaatcccccaaggacaggagctaaagtataacggagaatatccaaattttaaggaagtctttaaatgcatgccagtgtgtaagggaacttatctttctgtaagtgaatgctgttttacttttcttagcccagtagctaacagatttgacttctcatcatacctcgtttttaagggagatatctgagaagtaaaatgtaatgctgtttatgctactgatctttttagcacccaggagagtaaggagggcagcaccttcaagttagtgaagatgagaagagagccaactcttaatgaaatattttcttgaatctggcagtaacacgaaggatctaaaaactgataaacacttcggttacatcaaggacttttatattcccttctttattatgccagatgtgagctgccaacttaactaattaccatgttctcagtgggaagtttgctgtaatgcattttttgctcaaaaatatgttaaacataaaattcatttttttttcatttggggtcttcattttcmaaaaagggaaataatatataaagctttgaaaagaaaactacatagtagcatttacataggaacgtttcttgataaaatacagatatacgacccaggaacaagcctggcaaaaaatttttcctgagggttttcaagttagaaaacccagtagtagaataaaattatccaaagacacatgttttggcaaacggtaacttacttctcttttatattctgttagaaaatattcagttgcttttgttggtatttaatattttgagaatatctaaatataataaaaagatccgctttcttcatttgcaaatgagaatgtaaagttcattattttgaccagcagtttttgctatttgtgattaaattcctataagaacttgtttgatatgagattgtgctcttctcaaataactctttaattttaattttacacctttgcaagtgtcagaatgatttgaatatgagagaaaagataaaggacacacagaataactgtgtgtaaatgatgtgcctttattattgttaaatactaaatagtaactattgtttaaagaaaattagtagtctttgaattcacaaattggagacctatttacacttcatttgataataattgctagcataagaaagacattatgttcaatacatatcaatatacataattaagaaggaaatgatttatattcaaggtcatgaacatcatacatcttagatttcataataaagaccaccagtaacacagcattttactagacacaggaagttattttgcgttacactaaaatttaaatattcaaatttatttcctaatattttaccaattggcatccataatgtagacagttcaagttgttattaaatgcacacatgcagttaaatataaataaggtataaacaacaaaaatctccatctactatgtcaggatgttaaacctttcttatggaggaaaaaaaagtgttttgctacactttgagctactcatctggaaaatcaggcttatccattaggcccatggatcaccattgaattactcatctgaatgtagccaaaaactcatactgggaaaacagtttaagaagctaattaaactgatagaaagaaaactttaattttaaagaaatatagaaagcagatgattatttataatttcaattaaacttcctaggctcatatatgaagaataaagtattaaacaaggagaacaagaccaatgcaaatatgaattgtggacatcaggtcttaggatatatatactaaaatacctaggcttattcagtcaaaaaaatgtaacagttgacccttggacagtgtggagtggccgaacgcttgtgcagtcaaaaatccacagataacttttggctccacaaaaactttaactacttacagcctattgttgactggaagacttactgataacataaacaattgattaacatatattttgtatgttatatatattatatactgtatactgtattttcacaataaagtaagctagagaaaagaaaatattatgaaaataataaggaagagaaatatatttattcattacgtggaagtggatcatcataaaggttttcttgtggtttataggctgaggaagaggaagaagaggagggtttggtcttgctgtctcaggggtggcagagacatataagtggacttgctcaattcaaacttacactgttcaaggaacaactgtatatctatatgtgtatatatatatatatatggacatataaatgtatatacatttaagaatttcagtgaattaatcagaagagactcccttctttattagcaaacataaataaaaatagatacaggtaccaacattcaataacaacttgtttttttgatatataatttatttatatctacttattgaaaagtatgcaatatatgctctgtttattttctttcttctctcactatattaattgtatcccttcccacccccttgaaataatctagatttataacttccagtgtttcatagagatatactaaaagttttatgagattattctggagttaccatctgtaattttcaaaagtaaactaaaattgctcagcggataatacctgtattccatytggaatatcattatttgtgcatagttgcttattaatcattatcttggaatcagaataattgatcgatacagcaaagatttttgtaaatatcagcagtctttggagaatggagagttaggaaatttgaagattccaaataagtcatattaacagatgattatgttcctactaataattgtattactagtagaacaaattggcctcattcatctttatttttgttagctgtttaggagcattagactggtgggtacacttttgtctttactagtactaactagcaaaaggctgttttcaatctttttaaataaatatctattttagtgaatactgtaggtatatatatcatcagaagcaactactttgcaataaataccactactgactttgtagacattttcttaaggcattgtacctcagtttgaacaatagaatttcatttaatacaaaatgtttatcattatttcccttcttggaaggacagtctagcaaactctgaaggtgtttctcagtaaggacttctacgaatgtggcaagattgttaacatgatatcacttggcaaagtttctcatattacatgtggacattttaaacgtatttagtaccatagccttaatgtgtttttattgtataaacaagttgtattttgattcagatatacttagtttttaaaaagtagatgttgaaatacttttagtttggtaaatatttcttttcaagaataattccaattgtgatcctcttccatattacaatggtaatatagggtttatttgctgctaggtaacagataaaattgctgttaggtaacaaataaaatatgcaactaagaaggtttgtaacttctgttttatttctatcactggtatgtgcttgaattaatgaaaagcgtctgagactactgattatttcaggaaaaaatttgccagcaattcagagtagttgctactacatggtagcagtgtgtttctttctctagcatagctgggttgcaattaaaaagaaaacagacatttggaaatattctttataaaaacaattattcttgaaacttgaatttcagtgaacacattataaactaaataaaattaacatatagaaataattgtaaaaacattttatgtttcaaaatcattgtaaaaatgttttctcttttaaatatgaggtttactctttaattcttcaaaaattccagtaaatcgcctcacttttggtctcatctgcttgctacctaacctatattggttcattggtcctttcagtgatacttgtttttgtattctagactatagataagtccatagacttctgtcatctttccctctagctaatgacagcagcactatcatcataaatattataggagcttctggtaactgagtacctactgcatacctggaactgtgataggtgtttcaaagataatcagtatctttgtctgaaaggtaggtagtattacccttgtataacttaaattgcagaagaattggctaaataaaataaatgatgaaaatagctgtaagacaagaaatgtgggaatgagtatattttttagggaagggggacacctgccttttaggtacaatgattgtttttaagtgagctaagcatgaacagatttcaggttttcaagagaatctgaatctgtgaattatgatgtgaaatagccttagagttgagatggccaattgaattatctttctaactacatggtgggtgaagcaaaaacaaatgtagacaaggtctgctgtaagcaattttataggctacttggtgtcacacaggtactaagtgataaagcaggatcccagcccagrtctgccagggtccattgcactccttttcctctaatccacactgctttgtgagctacaggcctgtataaatgccactatctgatttgtatattctatttctaggcagttgaacattttgaggcaaaatcatgaaattaaattgagtgttgtccaaatttagctgccccccttttattaattgctccctactttttttataggttctaattcctgagatagtaaatggcacataggaaatttcttaggagtaatttggggatcaccatctgtggtgtagaaggggaaaaggcaggattaagcagagggagaagttgagctgcaaagcacatccaacaaaggccttcagcagaccccatggggagctctaggacaacccaaggtaaggtgggggacttggcctttatacacttgcattgagatttgatgaaatctggctgccttgaggagaggaagtcccttcggctgactctgaaaagggctgagaggcaggacatagtggctcacacctgtagtcccagcactttgggaggccaaggtgggaggattgcttgagcccaggagtttgaggccagcctgggcaatatggcraaaccctgtttytacataaaatmcaaaagaaatagccggccattgtagtcccagctactcgggagactgaggcaggagaatggcgtgaacctgggaggcggagcttgcagtgcgccgagatcgcgccactgcactccagcctgggagacagaccgagactccgtctcaaaaaaaaaaaaaaaaaaaaaaaaaatagccgggcatagtagtgcatacctgtagtcctacctacttaggaggctgaggtgggagaattactttagtccaggcagttcccccagcctgggtgaaagagcaagaacctttctcaaaaaaaaaaaggaaaaactacaacaacaacaacaaaaacaaaaggactgacagctgaagcttttctagcagcagcactctctttcacagttacgataatagcctgcaataacttatcctggcataaaaagaatttgcatatcatataattggtgattttcttgaccttcattctcaaacagaggctagttatgttttatatcttctgtgggagagaggagaggaaatcagaggggaaataataggctatcctctttcggaaaaccaagcggccaagggggtatcccttggtgcacttttagagaatatccaaatattctctaagcccaaagctctaaacatcctagatcagattaaggaaatgtagaaccaaaaatcagaaatttctggaactgtagccactcttttgaaagtgccaggcagacacaggactcagaattgtcctgtcaatactcagtctggactgtataattttaccggttggctccaaaatgcccagtccagaaagggataaaccttgatgggctgcctgcaaaatgtattaatgtttttatattgttttccaggaatttttattcatgttttactacccattataaagacaatgtggttggtcttcatcagtgtcatgttcaggggcccttaatagcactttgttgggattttaatctgttaattaaattaataattaaaaattactcatctattattcatactccttattatattaagtgcctttctcatataatgttaagttgtttaacacctttactttgagcaacattaataataatattctaaattgttggctactttttcaaaatacctgatactcttttcatggagtagttttttaaaaatagcttgtttagataaagactgaaaatgttgctaatctggtttaattctggatgtttgaaattatttccagttgtttaaaaagctttatgaaaaataaaacaaagcttccctcaaatcatctggcaggtgactttacaagtaaccaggaattggtcagttttcaatatcatttaatcataatacgttaattgagttattgctaatatattctcacagggtatttgttctaatttactaccttatcacactgctataaaaatagcagaagatgtgttccgaaagccactgccatggacgttcataagataatacacagttaatctgttatgcctcaccttcatagatctgtccagaaacagaaagcacctctcattttccattgatccttttctatctcctgcctcaacaccaccaaatatttttattccacacaactctgtggccttccaaaattattaatttaagagattctaaccaagactctgtccaagaatgaaatagcttatttatggatccattcattggtttatggatccagggtgccctggagaacaccacaaatcttcgtgacatcccaagtgttaactttaatgtttatatctttaatttagctgaaagatgtgtaaaatctcatatagtcaaatagctccctcttgactgaacatataaaattgggattaaagcatgctgttccaatagatatcaatcataacttatgctcaataatttatttttgaatctacattttaagatcgcacaatgttaaggagcaattgatttttttctcccatgcggcttatttgtggccaaatcctagttgtacagagattgccttgaatatccagacttcctctgggcttccctgttatatgcaatagtgtaaccattaaaataaggtcagtaagtaacctcttggcatcacaaatagcagcaggacagtagtaagtatatgtctgtctctacatatagtattttcctatttatccagctcattacataactatttttactttattatttcaaaattggaaaatgatataactaataataatcmccatacataggaagggatttgactgtaaagataaatttaggccgggagtggtagctcacacctgtaatcccagcactttgggaggctgaagcgggaaggatcacctgaggtcaggagtttgagaccagcctggccaacatggtgaaaccccgtctctactaaatataccaaatgttagccgggcatagtggcgagtgcctgtaataccagctactcaggaggctgagacaggagaatctcttgaacctgggaggcagaagttgcagtgagcccagattatgccattgcactccagcctgggcaacaagagtgaaactccatctcaaaaaaaaaaaaaaaaaaaagataaattcaaagtcacactgkgtttcacatgtagcatactgkgtactctccagtgtttctgcaaaagccgttcttcagcatgttagtcattagtagactctgacacattctatatttgtcactcatcaggttagtttaatatccactctttccaataaacgtctgattctgaatattccatatgtagagcagattaaaaataaaagggaaaacacatagtgaatcatgttttaatgttcttaactccattaaaaatgcattatatgcttcacctacttgcaaaaaaatgagtgaaattgaaataagacacagatacattttattttttatttatttatttatttgtgacagagtctcactctgtcacccaggctggagtgcagtggggcagtytcagctcacggcagccttgacttcccagaatcaaacgattyttytgccccagcctcccaagtagctgggactacaggtgtgtgccaccacacccagctaatttttgtatttttagtagagataaggtttcaccatgttccccacgctcgtctcaaactcttggactcaagcagtcctcctgccttggcttcccaaagtgctaggattataggcttgagccatcatgcccagcctccctttttttttttaaaaaaaaaaaaaaagacctaaagatatcttttaaagtttgaatggatattgataaatttactccaaatctgaggcaaagataatttcttataatatttaaagwatacttgtatttagcttagtattataaaactaatattgaatttcatgcccttctgaatttctgtgaaaatttaccatttctaaaaattattcataacccttggcattttataattttatttcattattttattttatttttaatttcatttaacaaatttttatttatttttttgagacgaagtcttgctctgtagccaggctggagtgcagtggcacgatatcggctcactgcaacctccgcctcccgggttgaagcaattttcctgccccagcctcccaagtagctgggattacaggtgcccgccaccatgcccagctaatttttgtatttttaatagagacagggtttcaccatgttagccaggatggtctcgatctcttgaccttgtgatttgcccgcctcagsctcccaaagtgctgggattacagttgtgcaccattgcgccctgccccaaattttatatcttttgaccaacgtcttctcccccatccctccaaccactcctgcccttgataaccaccatttccctttctacttttatgtcagcaatttttttctatcagtgagattatgtggtatttatctttctgtgcctgactcatttcatttaacttagtgtcttccaggttcatctatgctgtcctacatgacaggatttcattcttttttgagggtagttactattttattgtgtatatatattacattttctttattcattcatgtattgatggacacttagattgattccacgtctggctgttttgattactgctacagtaaacgtgtgatgcaaatatctgttcaacatattggtttcattttctttggaattatacccagtagagaaattgctggatcatgtgctagtttcatttttaattttttgaggagattccatactgttttctataatggctatactaagttacattcctaccaacagtgtgctagcgttgccttttctctacatctttaccaactccttttagcctttgccattttggtaacagccattctgacaagagtgagggatatctcattgtggttttgatttgcctttccctgatgattaatggtgttgagcattttctcacatacctattgatttgtatgtcctcttttgagaaatatctaatcatgtattttacctgtgtttttattttgtaatttattttttattaattatttatactcatttatttatttaagacaagatcttgctctgttgtccaggctggagtgcagttgtgtaatcacagcttattgtgatttcatagagatgggggtctcactatgttgctcaggctggtcttgaactctgggcctcaagtgatcctccgccttgccctcctaaagtgctagggttgcaggcatgagccaccacacccagtccattgtttaaaattgagttatttgtcttmttattgagttgtttgagttttgcatatattctggatattaaccatttatcagatatatagtttacaactattttcttccattctgtatcctgtckctttgctcttttgattgtttccwttactgggcagaagttttgtcatttgattaattccatttgtctatttttgctttaattgcctgtgctttttgaggtcatatccaaagagccattgcccactctaatgtcttggagctttccctctattttttcttccagtagttttatggcttcaggtcttatatttaaatatttaattcattttrtttttttttttaatayggtgtgagataagagtctaattcattcttcttcatgtggatacccaattttcccaaaactattcattgaagacactgttctttccctcttgagtattctggctcctttgttgaaaatcagtttgctctaaatgtgtggatgtgttttggggctccctattctgttccattggactatgtgtcttttaatgccagtgccacactctttcgtaacttactatagctttttagaatgttttgaagccaggtagtataatgtctctaacctcattctttttgctcaagattgctttggtgatttggggttttctgtgctcctatacaaagttcagattttttttttttttctgtgaagattgtcattggtatattgataggtattgtgttaaatctgtaggttactttgggtagtgtggatgctttaataatattaatattaatgctttcaattcatgaacatgtgagatcttttcatttatgtcttcaattttttttcattaatattttaaattttaagtgtacagatattttacctctttggttaattttactcctgagtatttttttgtaggtattrtaaatgagattgttttcttattttcagatattttgctgttagtgcataaaaatagtactgatttttgtatgttgattttgtatcctgaaacttaatgaacttttttattattaatagttctaaccatattgagtaatgtctttagagttttctacatatataattatgttttctgcacacagagagaacttaacttctttctttccaatttagatgatttttatttccttctcttgcttacttgatctggctagagtttccagtactatattgaatggaagtagcgcaccaggcatcctgccttgttctaatgtcagtggaaaagtctttagctgttccctgttaattatgttagctgtgcgtttgtcatatatgatttttattatgttgaggtacattccttccgtacctaacttgttgagagtttttatggtgaaaatattttgaattttatcaaatgctttttctgcacttattgaaatgattgtgtggtttttgtctgtcattctgttaatatgatgtgtcatatttatttatttacatatgttgaactatcctttcatcactaggatgaatccctcttgattttttttttttttttgagacagtcttgctctatcacccagggtggagtgcaraagcgcaatcttggctcactgcagcctctgcctcccgggttcaagtgattctcctgcctcatccctagtagctgggactacaggcacatgccaccacggccagctaatttttgwatttttttttttttttttagkggaccatgttagtcaagttggtctcaaactcctgacctcaaatgatccacctgcctcgacctcccaaagtgctgggattacaggcatcagccaccacaccaagccacaaatgatctttttaatgtgctgttaaatttagtttgctagtattttctttaggatttttgcatctctgtccatcagagatattggtctgtagttttattaatagtgtctttgcctggctttggtattagagtgagactggctttttattataggtttggaaatattctttcctcttctgttttttggatgagtttaagaagaattggtatttaattattctttaaatgtttaatatgattaagcagttagtatcttgatctcctctgtaaattaaaaaaaaaaagtagctaagccatcagttcctgggcttttctgtgatgggatagttttcatcactgatttgatctccttactagttactgtatcttactgtatgcatcaagggctttattcatttcttccaggttattcattttgttggtgtagaattgttcacaattacctttttttttttttttttaagacggagtctcgctctgtcgcccaggctggagtgcagtggcgcaatctcggctcactgcaaggtccgcctccagggttcacgccattctcctgcctcagcctcccgaatagctgggactacagacgcccgccaccacgcccagctaattttgtgtatttttagtagagacggggtttcaccgtgttagccaggatgttctcaatctcctgacctcgtgatccgcccatctcggcctcccaaagtgctgggattacaggcatgagccacagcgcccggccaccttttattctttgtattttacttgkatcaattgtaacgtctcctttcatttatttgagtcttctgtcttttctgttagcttagctaaaggtttattggttttgcttacttaaaaaaaaaaacaaaaacaaaaacaaaaaaacctcttggtttcctttaattttttctattggctttctactttccatttcattagtttctgcttagatatttattattttcctttttctactaactttgggcttagtcttttcttgtttttctagtatcctgattttcaacattttgtgatctttctcattttttgatgtcggtgtttcttctataaacttccccttttgaactgctgttgctgtttcccataggttttgatatgttatgtttccattttcttttgtctctggattttttttttttttttgacggagcccaggctggagcgcagtggcgccatctcggctcactgcaacctccgccttccaggttcaagcgattctcctgcctcagccttccgagtagctgggtttacagacatgcaccactacgctttcctaattttgtattcttagtagagacggggtttctccatgttggtcaggctggtctcaaactcccgacctcaggtgatctgcctgcctcggcctcccaaagtgctgggatgacaggcatgagccattgcacccagccagaaattttttttttaatgattttttttttttttttgacaaggtcttactctgtcacccaggctctagggcagtggtatgatcacagctcactgcagcctcagccttcatgggcataggtgatcctcccacctcagcctcccaaagagctgggactgcaggcacacaccaccatgtgtagctaatttttgtattttatatagagacagagttttactatgctgcctaagcttgtcttgaactcctgggctcaagtgatctgcccgcttcagcctcccaaagtgctggaatcataggcatgagccattattccccccaacctgatgaaatttttaattttacttttaatttcttcattgatccattggttgttcatgagcatgttgtttaatttccatgtatttgtgaattttttgaagtttcttccgttatttctaattttataccgkgtcatcagaaaatatatttgatacaatttcaatcttattaaagttgttaaaatttgttttgtggcctaacatgatctgtcctggagaatgttccaggtgcagttgagaataatatgtattcttcagctgttaattagatttagttgatctagattatattttaagtcggatgtttccttattggttttctgtctggatgatctgtttattgctgaaagtgggctgttgaagtctattactatttctgtattgtagtccatctctcccttcaaatctgttaacattcgctttatatgtttaattgctatgctgttgggtgcatatatataattcttatattctcttgctgaattgacccctttatcatgatataatgaygttcttgtctctttttacactttttgacacattgtgtattttatctgatttaagtttggttatttctactctcttttggtttccactgcaggaatatattttttcactcattcacttaaagcccatgtgtgtctctacaagtaaagtgagtctctttaggcagcatatagatggctcttgtactttaatccattcagccactcagtcttttgattagaaaatttaatccatttacattctagataattattgataggtaagtacaaactaccaccattttgtccattttgttaggtttttttagttgtttcatagatcttttgcttttttacttcctctcttgcttttttttttttttttcctttttgagacagtctcactctgtcgcccaggctgcartgcagtggcaccgtgccgtgtcggctcactgcaacctctgtctcctgggatcaagcaattctcctgcctcagcctccaaagtagctgggattacaggcgcccaccaccacgctcggctaatttttatatttgtagtagagacaggatttcaccatgttggtcaggctgatctccaactcctgacctcaggtgatcccaaagtgctgggattacaggcatgagccacyatgcctggcctcttgctttcttttttgkggctgattttatgtagttgtatgttttacttttttgctttttattttttgkgtatctactataggattttgctttgtagttaacatgaggcttacaaaaacatataactggttatgtaaagctgataacaatataactttatttcaaaaacaatacaaaataagaaaaaaaaaacataactctggttgctcatggataagcagaacccagaacagactggtgcaagagagaagggaacccagctccacatttgtggcctgaagctctggactgattggcaaaaattttaaagctgacaatactggaagagaacctttgatcaaaaacactagaaattgatagagacgtgatacagacaccatgatcaaaaagagaggaagctcggatgtctgctcaaagtagttgggcaacaggactggcccctggactcaaaacagacataaggaagtgatgagtgaaggaaccttgggcaccacatgcccactgtggacctctgagatcctagctacaggagttcttatgacctccatagacctttaaactggcaggaagagctgcccaaagaacagacagaggcacaatttgtacctatgtggagccagaaggttttgctgcattgcgttgtttcagcaaaacgttaccatagatgtccatctctcaaggctctccatcttgtgctgagtggctacagctcctgctgtctgctggtccaggagagagcagggccaccactgctgcaggactgaggygcatytgatccatccacccccttgcctgttgacctcttccaagaccacctgcctggctgctcccacaggagagtgcctacagcacagattccaccgcccccatctgagtgctttgctgttggcttggaggcagtttgcccctcagaatagccagtgcaataactgaggggccagtggacaaacccacgggtatggtcccagttcctcaggactggaaagcacttctgagggatatagaactgagatctatggcctgagcatgaacaaggacgatgacctcccctctccccagctctaagaatacagaggactgtgtcatggctttgtgtgccagtatgggagctgggcatccctcccttcataagaccagcccaggaaggagatgtcatgataaatgtcttcttccttgggagtcctgtggtctagaatgtctggaatgactctgcgatctaggcttggaagaagcctagttggtcaggcctgctcccatggcagagattggagggagatccattgggttgggggactgcaagttgaactggcctcactgcattggctgggctgaaaaccctgggctgtgggcactacactagttacaaacccatggtgccactaccctgcctaaggatgctctgcccttgaacccactgcatcaccagaccacctgcagacataccatgcaatctgctttgactccggcaagcacaggggactgatggtcccctgggagttgcatgcctcctggtgacctccttcaacatggactatccctaagagagggggtgaatgcagcctactaaaatcttcctttaggacaaaggaaatgggtgcagcaccagcagttaaaggggacaacaccaaggtctaggaatggacatggaaagggagtcatcttttgcctccggtctccacactggagcactgctgcagacccactgaaatactgaaggtatgagcatggcagagtaagagcctactgagccttacccttaaatgccatctactggactgacacttgaattataccaccaaacaaaaatatattgtgtttacgcccaaggcctgtaaaacccaccacaggaacctgtctacagcaaaggaacccttacagagtcttggccctctgaaaaaaaacatacaagcagctaacaaacatatgaaaaaatgctcaacatcactaatcagagaaatgcaaatcaaaaccacaatgagataccatctcacaccagtcagaatggctattattaaaaagtaaaaaataacagaagttggccaatctgcagagaaaagggaatgcttataactgttggtggggatgtaaattagtccagtccccgtggaaaacagtttggagatttctcaaagaactaaaaatagaacaaccattcaacccagctatctcattactgggtatatacccaaaggaaaataaattgttctaccaaaaagacaccttcactcatatgtttattgcaacactattcacaatagtaaagggatggaagcaacctagatgcccatcagtggtggatttgataaagaacatgtggcacagatacaccatggaaagctgtgcagccataaaaaagaatgaaatcacgtcaatcatgttccatgtaacaacatggatgtggctggaggtcattgtcattatcctaagaagattaatgcagaaacagaaaaccaaataccacatattcttatgtataagtgggacttaaaccttaggaacacatggacataaagatgggacaatagacaacagagactccaaaatgagggagggaggaacgggggcaagtgctgaaaaactaacttttgggtcctattttcactgtcttggtgacaggatcaatagaagcctgaatcttggtttcatgtaatatacccttataacaaactggtacatgtaccacctgaatttaaaattaaaataaataacacaaaaaatgcagttttcttccactagtctcatcatattttgaattttgatgttaccatttgcatattttatattgcacatctcttaaattattgtaactattatttttaatggttttgtgttttatatcttatatttaagatataaataacttatgcagcactattagagtattagttaatctgaatttgtgtacttacttgtaccagtattttatactttctgaatattttcatattactcattggcattttctttcatcttgaataattacctttagcagtttttgtaagacaggtctcatggtgatgaagtcactcagcttttgtttgtacttcatttctgaagtacagacttgcttagtacagcattcttggtattcagggtatttttccttctaggctttgaatatgtcatctcagtatctcttggcttgtaaggtttcagctaagaagtgtgctgcttgtagtattggaactcccttatatgttgtctcttttatctttctgctttcagaatactctctttgtctttgatatttgacaatttgggcagtcttattttggctaaatctgcttggagaacatttaacttcttgtacctggatctttacatctttattcaggtttggaaattacctactactatcttgttaaagaaattttctatcctattatgtttctcttctttttctttaacacctatgacatgaaagtttgtttagatattcttctttaaatctcataagttttttcatttcttttcattttttctcctctgcatttgtttaaataacatatctttgagcgcacgttattattattattattattatcttgttggatcaattctgctcttgatgctttctactgcatttttttcatttattgtagttttcttctctgggatttctgtttggttttttaaaagtatatgttcattaaatttctcattccgttcacatgtttttcttattttactggattgtttctctggatcctcttgaagtcctctgagctttcttaaaacagtttgaattttgtcaggcagtttatacatcctcatttatttaggtttagccattgataccatattttgtctgtttggtaatgtcttgtttttctaattattcttcatccttgtgattgagcattgatgtctgctcatttgaagaagtaagacctattccagtcctcatggactggctttgtctgggaaagccctgaggtatatgtggcactagggtgcattagaaacctgggacaattgtggtcagcacagcactgccagaaccctggggactacaacagcaggtgtgactcctggggtggactgcaaactcagtgcgcctgtagtgggcatggcattgccagatgctcagggaagctgtggccaatatggcacatgcaggtgactggggcttgctacagcaggcacagtgctgggatgtgcctgaagcacagtgcagctgcatccagtgcaatgctgccagaagccgtggcctgttacagcaggcatctttctggggcagggcagaagcttggttcagttgcagctgggtcaggtctgatgactcagttcatggatactgtcctggaatatgggactatagggatatccctagtgctgggttttattgtggtaggcccagtggtagagtccacggcaaaatcttgtgcttgcttcccttcatttccacaaagtggatattatctctctctatgctgcactgtcttgtgttggggaatgggtaacatggatgatgtaaaacagtcttttctaatttcttcaatgagtgttttcttattattttcctacaaccacatactttgatctctaagttggtttctgttgctcttgtgaatgtagttttcttgggtgtatagttactcaaattggtatttctgcaragagaaagttgctggagggtcctacttcacccctccccctcatatttttaattttaaaagatattccttcatatgtattttgctattgtattttttaaagtccatattgttcatttatttacagtagccaattgacaaataaagcacctgcttctatgtgagcaccaaaaatattttagatccatcaattcatagtttataaaacactaaatttcatgtcatttttgcttgtttcccaaatttyttagaaattacctaattaaaaatctttctttataagtatcttcttttttgctgacattctgtgtacgacacagtatgttatactatggagtgaatgaaggatattgttttttttttaattaaaaaaatacattttacctgagcaaaatyttatagaatttgatggtttctctctttgcctcagcactgatatattttaaaacaaattggttagtttttyttatgaaatagtatttcttgtttttttttaaatgaaccttgcagttatttagcttgtttacattggcattataaatattatttaatgtagtgccatatagcttgtagaaacacattaattttttttttttttttttttttttttttgagacggagtctcgctctgtcgcacaggctggactgcggactgcagtggcgcaatctcggctcactgcaagctccgcttcccgggttcacgccattctcctgcctcagcctcccaagtagctgggactacaggcgcccgccaccgcgcccggctaattttttgtatttttagtagagacggggtttcaccttgttagccaggatggtctcgatctcctgacctcatgatccacccgcctcggcctcccaaagtgctgggattacaggcgtgagccaccgcgcctggcccgaaacacattaatttttaaactaaatttgtagggkgttatcagcattgtgaggaccggaataacatctgctttcttccctactgtgtaccagaactcagcacaattctcggtgcataaaaggcactcagtaaatatcttcaaattataaataataataataatttaaataaaatagaatatcataatgacattttggtgttttttttgtgktatattaaccaaatcatttccagcaaacgacagctacataaataaaactttaatataataatttctccctccaaacatcacaaacttttaatgtctgatgaatgtttttctcccttatcatgcaggaatctacagggaggagccgaaagtatttaatagagacttgtgagaaatttgctcatttagaatttcaagttcttgttttttactattttctctcaaattgttatctaytgcctttamgtttttgtctctttatacaccactccctggttcatcactttctccttattccttttgcttttgttcactcgctttttaaatttcatccacgattcaatttagtcatcagttgtcagtgatgtcctcgatgacttagttaattttatgttgctataacaaaattctgcagactgagtaatttataatgaatggaaatttatttgacttaaatttctgaaggctgtgaagtccaagagcatgtcacagggacctggtaggggctttgattctgtgtcattccatagtggaaggtggaaaggcataagagtgtgagggcgagagtaagagatagaaaggaagggaggctaaactcatgcttcatgaggatgcttctcttgagatgacaaacccagtcccttcctcaaaatggggacagaaccctcctgacctcatcacttyttaaaggtcccacttctcacactgttgcattggggattaaatttccaacacaggaacttgagagtacacatttaaaccatagcaccagtcatgctgttagcatgtggaattacatcactgtaataaatacctgawccaaactttaaatgtaccgtcaatgttacacaagcctctatgtatcatcatttttctctcttttgctttatagaataaaacaaatatttactttcctcaaatttttttttctatttctggttttactcttaattctattcttgtgtgtttgtaaatgccttcattctactttcacatttaataaatgttttggcagaaaatatttttcttaagaattttgaaatctttgttactgtcaagaagcctgataacattctgattccctttcctttgtttatacacttctgtcttcactctcattctctggaggctctgctgtgagtatatttgctttaagcatatctggattttttttcagtgtattggacattagggtaagcccttttactctggaaatgcagttttcatatctccgaaattttgttgtattgtttctcagatatgttccctctctgttttcccttttctttgtttctagttcttggggttgtcttcgttttgcttactagattgatagtttgttttgttcatgactatatttcatttgtttgctttttttctactttctaagagatttgattgacttttcaatatttactaatggctttttaaaaacagattttattttttatattagatttaggttcacagcaaaattgaaagatggtacaaaaatttcccataagcacctctgttcccacctaccacagactctcccactaccaacatctggcaccagaatgactcattttttaactgataaacttacgttgacacatcattgtcacccaaagtacatagtttacattacagttcattcatgttcattctatgggttttgataaatgcataatacatgtatctaccattgtactaacacacagagtaatttcacttcaactatgaatcttctttgttctacttatttatccctccctccactcaccccctaacaaccactgatgctttttcttttccatagtttcgctttttccagaatatcatataattggcattctacagtttgtagccttttcagtttrcctctttcgcttcataatatgtatttaagtctcctccatgtatttacattctttggtagctcatttctacttagcactgaatacaattttattgtctagatatactacagttgatttatcaattcacctacgagaattaggttgctttgttgcttccaagtttggcaattataaataacgtttctataaatacctgtgtgaaggtttttgcatgaacctaggttttcaactttggggtggtaaatactaagtagtgcaattgctagatcatatagtaagtaagagtagatttagtttagtaagaaactgacaaactatcttccaaaatggctgtaccattttgcattcccactagcaatgaatgggagttcctattgttccatatcctaaccagcatgttgtgttattaatgttctgcattttggctattttagtaagtacctagtggtatctcattttaatttgtagtttcttaatgacatatggtgttgagcatctttttatatgcttatttcttgtctgtatatctttttgttgacgtatctgtttaggtctttttcccagttttacattaggttaaaaatggggttacttttcttctcttctgctagaagtaggaggygatttttttccaatatttactctgagaacttggtagagttcctaaggtaaaactcataaaaatgtgaagaacctcttatgagtgagtgtccctggattttttaactctcataattgtccacactgattacctaagaatttgtcagttttagttgagggattttttgttttgctttttgccacagtagtagttcctacagaggtttctgctggtggatttctccttcaataagttgttactccctaattttgtatgtctatctctccactttttagggcattggtttgccctttgacctaacttcgctgatagttctaaaaagagttgtttatttttttagtttgttcagcttttaaattgttggtaggatgaagtgatgacttctaaactttttacatgctggcctggaatccaaaagttccaatattacttattttttaaaatttttgtatcatatttttaagagttcctctgaacccccaaatgctaatagatggagatcattgtctgagttaacaatatttctgtagggaataattatttattttgacaaataatttttattttatttcatgccggtgcagcagagatttcatgatgtttatggcatataatgatctaccagttgctctatttaatgttattacttttaataactaaagatattaatatttattgccttgtgaagcttcatattttcaaaacattttaatatttaatccgattgggaagtactgtgatacagtagaaactgaactgatttagagtatgtcaaacgtgggttagactcgtgctgctatttacagatgacagtatctaagactaaataccctttcatacaacttgggaataaaataaaatgattactttgaggatttktaagaagtaaaagtatgtgtagattattatattagctttatacttcttctgtaataaattaccactgatttaatgggttaaaacaatgcaaatttattttctttttcttttataggtcagaattttaacatgggtttaaactgggccaaaatcaagaagtcagcaagaccacttttctttctgcaagctttaggggacaacttattccttacctttttgagcttgtagaggccacctatattccttgactcatggcccctttctgccatctcgaaagccagcaaaaccaggctgagtttttgtcatatcatggcactctgaccctaccttttgcctattctctaagaattttttcagagttaccacaaagaatacttttaagagttataattctcttagagaataggcaaaaaataggttcaaagtgatatatttaaggactcatgtgattacattggacctctccaatatccagaatattctcccatctcaacttcagctgattgccaacgttaattgtatctgcaatcttaattcccttttgctatgtggcagcatatttacgagttccaagtattaggacatggccatatttgggggggccattgttctgcctgtaaaagtatctaggaaaatcctgatatagactatcaataaatggatacttgctattcattcaataaaatatttattaagtaattaattttatagattgtatctacttcaraggaaccttgaggtagacatgacaggtactactctagctttccatctatttcatctattttaaagcattggtactaatgatacaagaatgcaaatcataatctacatawttttagtgcttataaagtatataaatattatgttgtctattaaaaaaagmttgactttttttaatyaataaaataaataatatcctagctacttaaaatgatttatatttttaaattataaaactaagaaaaaagggtaatacttgtttttaatatcrggtcacacagaagaatatttttttcgcatgctatattacaggtgtgtcattgttcaaatcatctttttttgtacagaatctgaaatactccaactaatattttcaagggctttgtttgattgtgtataatgcaggtctagcagctctactaggattcttgtaatcaacacagtcattttgaacaatttgaggtgacgactttactaagtgttctctaatctgactttgttttccctatgggagcaattattctacaaaatgacaaagcagcaagggcaaaaatctagctaccaatgacataaaatcactgctttatttcagagttgggattcttgatctcattaatggcctggaattgcatgacaagcttttccatttagacaattaacatattaatccacttcatgtagtatccatctgcwtatrtataatttttcagaaatattttccatacctccttgcactcatggactgtagctattttcaaaagcaatataatcactagatggtgtaaaacactaatataaagtacctgggggcaattactggccttcagaaatgaaaaattacagtcaaatcattttataaatctttgaaactcagatattgaggaatagtattggggtaattcattttcccactcagttaattccgtggttggccttttgtgcagtttgacaaatcaagacttcttgtggagactggagagtaatttcattcatagctgagaaggatttttttttaaagatggctaaagtcatttatagttctataaactgaattattatgtagctattctcttatcttttttggcagtctggagcaaaatccatacttaatagtaagtgaaaataaaaaaggagaaaaaagaaaaaggccacatcttagcggttcttagaaaaactaattattgttttttagcaaatgaaatcaactttgctttgccttacctagatttcctgatgaatgataaacaggagaggctgagctatattacttttcaaaatacatgcatagggatatatataaatatacacacatatataattatgccagtgaatattgtaaatgatattatctgtggaattaacaaattatttccaaagctgaaataccacaggtcaatgccaggttctcctccttactaattatgtgacttcaggaaagtcattttgcctttctataccttgatttcctcatgtataaaatgcaaagtgttggcaaccagagaaacttacctcactcttagtgttcagggtttttatggggagtcatgtacttaagtatgcagcgtctgtgtgactgacctcagctactctgctgctttgarctcccctaccctcaagagcaaaaataagcattcactgtaaatcatattgttagtgtaaactatctgatcaaaccagtattgtggcttaaggcctcagacctatagaaatactcttaccaggcagaatattccaagggctcagagctcatttcctaggagctggcccagggccagtgctgcagacagccttttcctgggaatatgcagggtytgagcaactttggtctgttgagttaacctttatgttgcaaattatatctcaaaatagtcaagaacaaaagcataaatatttgttacaaactctttacatttcttgttcttctatgataacactattgtagcctctgtcagtgaaaggagccaaagaatatttctttaatttgataaagcatttcatttaaattaagagttaagatttaaaacaggatactttgcttaacagaatccatggggaaattgagttttgattaattgtgtgttttattttaaaagggttaactagaaagacctttttacttatacttcctcattgaaaataattccaaaatattttagttattttcttacctgaaaaactgcttgaatttctaatgcaataaattgaataatatttttcatccagaaattttaattcaaatggcaacaaataagaaacaaagatgggttaataaatatatagtaggataaatattttaatctataatactaaattatagattgtaatatctcaaaattaccccattagcaattattacaatactatatgtgaatgaatcagcactaacatccaaaaacagtgattgaagaaatccctttaaacaatttagctatgagcacatgtaaaagatgaattataatatttcatgcaagaaaaaaagacttttagtagaccagtttaataatttatttttcttcaggacattcagtaggaagatagaatgatgaaatgatcactgtgagacggaaaggaaggaagacttggttaagatctgtttgattacgttctacttaatgcaagtttatacatagttaaggggtatgtgtgtgtgtttgtgtgtgtatctgtgtgaaatatatatattgcacagttcttattaattaattatttaattagcacctaaattgtcaagaattattttgggggaaatccctttaatggaaataacttaggttttgaaaacaaaaaatatgggttctatgtctgcctcctgctctccgtgtgactctgatcaaagtgtttacctccatttgacaaagtattttgtaccctcagtttactcatctgtattttgagtttttgcatggggactattttgttctttgaaagagaacttgttgtaaatgaagatggatttagacaaaaaaatagcttcatatcagtacagagccttgatttttagaggaaaggaatgactttttttttttgtgattttttcacaagagtggtagcaacgtaccatgtgtagattactttgataggaccaagcaggatagatattatcaaaggaggaccaattgatgaatttcattagctgagtgatttttttcttattgttttagtgtataggaatcccatttctgcatttcttggtgggacaagaattgataaaacatgggttacatctgaataatattactactgacctcagctgttgctttcagctctcccacccccaagagcaaaaataagcactctctgtaaatcatattgttagcgtaaactatctgatcaaacttgtattgtggctcaaggcagaatatttcgaggattcagagctcattccctagtagctggcaaagggccagttctgaagacaggcttttcctgggaatgtgcagggtttgagtaactcaggtctgttgaatgaacctttatgttgcaaattatatctcaaaatagtcaagaacaaaggcatagatattagttaggaactctttaaatttctttacctactattatattaataacactttagtgttaaaacatgggtgacatgtagtattgctactccacatgattagtacaaagcaaattaaataatgactataaaagcactttataaacccttaaatgctaaatacatgttaaaataatcattgtttatcaatcagttaacaccaatatacagtcaaacacaggttcttaagaagaacttttttatcattatgtgtgaggtgaactcctttgacagggttttctctcattctgttctcttagctatggaccacttgatcagtaagtaattcaaatgcaataatctgtaggagacatggatatttaaagtaacccttttcaggtatccctatgttgatgattaccttcacactttaaaacatcgagagtgaagtagaaaattgatccaattacctgactaattcatgcttgagaaaaaatatagttttttgtttggcctatgaaaaattgactaatattataaatacactacttttaatttgcaaaattacttgtattgatatactgatctgtaatctgaagaagaatcattactaataccatttttcagttcttaaatacattcagtttgttatgtctgtgttgaatttatttttcactggggttaatatttcttgttttcttttattttacctcaaattaaccacacctactacaccaccttctactcaatggttttgtgagtccgttaattatattacattatttcacattttaaaaatttgtggatatgttttttgttttttaagacggagtctcgctctgtcgcccaggctggagtgcaatagcactatctaggctcactgcaaactccgcctccctggttcaagctattctcatgtctcagcctcctcagtagctgggattagggtgcccgccactacgcctggctaatttttgtatttttagtagagatggggtttcaccatgttggtcaggttggcctcgaactcctgacctcaggtgatccacccgcttcagcctcccaaagtgctggggttacaggcatgagccaccgcgcctggctggatatgttttttaaattgaggtatacttctgtgaattctgtataagaattcactttagaaatacatttttatagatattaaaaaaaggaaaaatatgctttctgccaaacatgctaaaatgttaacctatatcttggtgacgaccgaaactttaatttttttgcagggaagtatccttagtattgatttgcagccaagcttgtctctatctcaaaggtcacaattttcaaacgagaatacctttttatgtggtgtttcagcacatctatttttagtttcagctaaaaacaagaggttaaaaatcaaccatggatgaaaatattcaaggaaaaaaactgatttttttttcaaatatgaaaggagagtcttgtaaatgtcaaatacaattattttagggataaaatgtaattcatgttatctttgaaatatgcagcaatttaattttaattggaatatattatttttcttattaatgtccaataatataaaaggtacaatttaaaagaaaaaagttgtatcaagattataattgtgcatattaattcaaatgtcacggtggtatgcagaactctaagctgagcaccaagatctccattccctggtgtacataccctatgtaattccctaggactgtgaaataggatggctttcactctctgcagctgggttatgttataaagctacagggattatgcatgtttaattaatgtctcaaatcattgatctcaacataaggagattatctagttttgcttgatctactcataaaagcctgtaagtctgggcctagaggtcagacaaagataaagtcagagattccaagcatgaagatttgatgtagctttgctagcttgaagaagagaaaccacacggcaaagaatgaaggtggcttctagttgctaagagccagcaaggaaaagagaacctcagttacaggaacttcaaggaagcgtaactctgacagcaacagaaaaagcttgggggtgaatttctctttagaaactccagaagagaagcccatccagattctttgatttgggccttgtgatactttgagtagagagcccaaccactgtatgccagacttctgattacaaaattgttagctaaaaatttgggtattgttttaaagcactaacttgtgataatttgttttgcagtgatagaagactaatacgcttcctataaatttagccaggaaaatatgccatgtaacacagtgcttactagcacacttttaatatagaaactaaatataatccaattaattggaagtatagctcaaataatatatcagactatgaagtacgtatttaaccatgttttagttcaatttttaaatttaaactctcaagcagattataaacagatttgacaaaatcttttttttaaaaaaagcacaatgatttaatggaattttttgatattaaaaacttttggtctttgaaagacaccattaagaaaactaaaatgaaagccacataatgaaagaagatattcacaatacatttatcttgcaatgggcttgtatcccgagagtgctcaaagaatgcttataatttaataagaaatcaaacaattcaattgagaatgaacaaaggaattgagcagacccttaaccaaaaatgatatctgattgaccaataaacacatgaaagatactttacaacatttgtcatcaaggatataaaaattaaagccacaatgaaatattactatgaagccattaaaatagttaatgttgaaaaaactggtaatagttaagtgctggtgagaatgtgaaacaggtatcctggctggcgaaaacgtaaaatggtactaacaacttggaaaactattggagttctcaaaatttatatatttttgacaaaatcctttatgtacagtaaaactcccatgattcattccacatgatagttaaatcttgattaaactataacctgcattggtgtaaaaaataataatgaaagtgacaataacaggaaaggcttttaagatctgtttgtttctttaattgcttgcatgaaaacaaatgattcaatatactctaaaatgctttcttattcttataaacctagctaattaatattatatgaagagttacctttactttgcctataactagaatttgtgaaagtatctttaaatatacattattaatatagaattttgttactaggttgaatgacttttttttcatttaatgctggctgatgaagcataaacatgttccaaaaaagtaacatacgggtgtgtgactaaaaatgttaatgacaaagtactgatttctcagccctgatatttctatactgatatccatcccagwagcatgttaattcccactgaaattctgattattgatactactgataaaaataattatcctctatgtacggtctcttatgtgtcagacactgtgctatgtgacattatcgcatttgtatctcatagtaacatcaagaaatttattttctattattatcctaacttacaactgaaaaataggtgaaattcattaataatgatgtctacttagatgtcccagaagtatctgaaatgtaattatctagaacaggggtccccaatccctgatatcagtctgtggactgttaggaaccgggctgcacagcaggaggtgagtggtgggtgagcgagcattactgcctgagctccacctcctgtcagattagcgctggcattagattcatgagagcacgaattctattgtgtgctgcacatgcgagggacctaggttgcgtgctccttgtgagactccattatacccccccaccccagtttttttccaatttgtccgtggaaaaattgtcttcacaaaactgacccctggtgccaaaagattggggactgcggatttagaagataagtgttgctaaaaaataagtttaacacagatctattataatttgctaaaatataactgtcaaagagttgaaaacatgaccctcataaatataaatgaaccaagtcagtgattttattcaactaattaattaatgcgagaatcagaagatgccaaaactggttcaaaggattattaaaagtactgagattaatatagtcagtcagagaacattaagaataatttactaatagatgcataattgcttaatatcctacagggctatgaactataacatttgagattgytgcctctagcagctagaaataaatcatatctatactggacaacatttctttagattactttaaataaaaatmattttcattgcttttataaaagaatcaattgcattattataagtgcaagttaatttcacaagttgtttatgagtaaattttatagaataaggaagttttccagaaaccttatcagcaatgctgatatgatgctgtagtaggcagaataatggcctttcaaagatgtctcttctctaactgtgaatatgttaccatccatggcaaaagagattttgcagatgcgattaatttaaagatcttcagatagggtgattatcccggattaccttcgtgggcctaccataatcacagggttccttaaaagtgaaacggggggaggcagaagaaaagttaaggccagagtgctgtaatgtgataaggactcaatcaccattatactggctttgcaaatggatcaaggtcatgagccaagaaatgtgcggagcatcgagaagttcaaaaaggcaaggaaatggataatctcaaaaagaaaaatagtcttgcaggcaccttgattttagaccagtgagacctctgtcagacttctgctctacagaactgtaagataatatatatgtgttattttaaaccactaaatttgtagaactctattatagcaaccataggaaattaataaaaatgcctggccggatgcagtgatcacgcctgtaattccagcactttgggaggccgaggtgggcagatcacgaggtcaagagatcgagtccaatcaggtcaacctggtgaaaccccatctctactaaaaatacaaaaattagccaggcatggtggcaggtgcctgtagtcccagctacttgggaggctgaagcaggagaatcgcttgaacccgggaggtggaggttgatacagtacatgattattaataatttgttgactggatgaattatttagggttcaataaatgtaactcgtttaggacatatagttaataaactggatcctagattaagcctctgtgcctgtccctacaacctgtacttttaccacttaagttgctttatttcttgtgtagtcaaaaataatatcctttaaatcatttccttagattattttgcctagattctccacattcattctgataaggaaatgatttatagttgataatgtttattatttagttttaataaactggaaaaaatcaatttcaggcatatgttaaagatattgcaggttcagttccagaccaccataatcaagtgaatatcacagtaaaataaatgtcatacaaattgtttgggtttcccagttcttataaaagttatgcttatactataccacagtctattaaatgtgcgatagcattatgtctaaaaaagtccatactttaattaaatataccttattgcttaaaaatgctaacagtcatccaaatcattatcttttggctattggagggcctgatctcgatgttgctggccactgactaatcagcgtggtggccactgaagcttgggtagctgtaccagtttcttaacacaagcatcaagtttccaccctgattcactcacaagagatttttctgtattatgttatcatttgatagcatttaacygacacttgaacttctttcaaaattggagtcagtcctcttaaaccctgctcctgctttatcaattgtttaggtaatattctaaattctttgttgtcatttcaacaatgttcactgcatctttacatggagtagatttaatctcaagaaaacattttccttcttcatttataagaagcaacttctcaagcattcaaattttgttatgagtttgcagcaattcagttacttctttargctccacttctaattctagccctcttaatatttctacaacacctgcagttatttgcttcccttaagtgttgaaattttcaaagcccctcaccttccttctgcagcttcctgacctctttcatccttcacagaatctcatcttgaattgtagctcccctaattcccatatgttgtgggagggacccagtgggagataatggaatcatggggtcggtttcccccatactgttctcatagtagtgaataagtctcaagagctgatggttttataagaggtttccccttttgcttggctctcatttctgtcttgcctgccgctatgtaagmcatgccttttagcttccaccatgatggtgagctctcccaagccacatggaactgtgagtccattcaacctctttttctttataaattacccagtctcaggtatgtctttatcagcagcatgagaatggactcataaaactggtatgcaaataagcagactctacatcatagtattccagtgtagttgaactattattataatggagtccctatccataaaattgattacaatctaatatggatttgtgcaataaggcaaatataccagtaactaaaatacagggaaagtatgctacagatgaattaatttatacaaatatatgagtcaaagggagaaattattcaattaggtaaaggaggaaagcatttattaaaattagagagggtgtctgggtgagagccaagtctgaaggatttttttgggtaatggtttctttactctattttctatcacatgttgaaaattttaacacattgctgtcatcagaaggtgtttataatttttttgtttatagggtttataatttttttgttttttaatttatagatttatttgattaaaaaagagtttcatgtaccagagatgggttattgaaaataggcattgtttaaaatatgataaatattttatttgaaaacttggatttttatgatttacaaaaatctggagaaaaaacagggcaaaaataacagaaaatgaacatatatttaaattccccaaatattcaaatatatcattatattatgatgaagacttacatattactattttgtaatatgacaaagatctattcttacatttattatgataaaatgttgctataatatgagttcattatatgaagctctgacatgttcctctcattcttcatctaatatctaataatgactacctgcaaggagaaataatcactcaagttgtttacttttgcagaaggtgcagtctctttcagagaattctaaaaaaaaatcacattctatttaaactagaaactttctattaaaataagtgaaatgtagttaacaaaggatatttatttttatgtattttgttagttactattttccttattttgaaaaacttcagatcactggaatatctacattacaaagtggccagattgtatggtgtctgtaatctcattaccttgtggtaaaaacacttaattttaggctggacacaatggctcatgcctgtaatcccaatattttgggaggctgaggttggtggatcaccttaggtcaggagttccagacaagcctggccaacctggagaaaccctgtctctaccaaaattataaaaattagccaggcatggtggcacatgcctgtagtcccagctactggagaggctgaggcaagagagttgcttgaaaccaggagaaagaggttgcactgggccaagatcatgccactgcactccagtctgggagcctgggtgacagagtgagactctgtctcaaaaataaagaagattggccaggtacggtgtctcatgcctgtaatcccagcactttgggaggccaaggtgggcagatcacctgaggtcaggagttcaagaccagcctcaccaacatggtgaaaccccattgctactaaaagtacaaaaattagctgggtgtggtggcgtgcacctgtaatctcagctactcgggaggctgaagcaggagaatcacttgaactcaggaggcagaggttgcaaagagccgagatcgcgctattgcacaccatcctgggcaaaaagagtgaaacttggtctcaaaaaaaaaaaaagatcagatggctgtagatgtgtggtgttatttctgaggcctctgttctgttccataagcctatatgtctgttttggtaccagtaccatgctgttttggttactgtagccttgtagtatagtttgaagtcgcgtagcatgatgcctccagctttgttccttttgcttaraattgtcttggttatatgggctccattttggttccaaatgaaatttaaagtagttttttctagttctttgaataaagtcaatggtagcttgctgggaatagcattgagtctataaattactttgggcagtatggccattttcatgatattggttcttcctatccatcagcgtggaactattttccatttgtttgtgtcctctcttatttctttgaacaatagtttgtagttctccttgaagaggtccttcacgtcccttgtaagttgtattcctaggtattttattctctttgtagcaattgtgaatgggagttcactcatgatttggctctctgcttgtctaatattggtgtataggaatgcttgtgatttttgtacattgctgttgtagcctgaaactttgctgaagcttaaggagtatttgggctgagaaaatggggttttctaaatatccaatcatgtcatctgcaaacagagaaaatttgacttcctctcttcctatttgaatacaatttccttcgtttgcctgattgccttggccagaacttctaatactatgttgaataggggtggtgacagagggcatccttgttttgtgctgactttcaaggagaatatgaacagacacttctcaaaagaagacattgatgcggccagcaaacatatgaaaaaaagctcaccatcactrgtcattagagaaatgcatatcaaaacaacaatgagataccatctcatgccagttagaatggcaatcattaaaagttaagaaacaacagatgctggcgaggctgtggagaaatagaagcacttttactctattgatgggagtctaaattagttcaaccattgyggaagatggtgtagcgattcctcaaggatctagaatcagaaataccatttgactccgcaatcccattactgggtatacrcccaaagggttataaatcattytactataaagacacatgaacgtgtatgtttattggaacactattaacaatatcaaagacttggaaccaacccaaatccccatcagtgatagaccggataaagaaaatgtggcacatatacaccacggaatgccacgctgccataaaaaagaatgagttcatgtcctttgcatggacatggatgaagctggacaccatcatcctcagcacattaacacaggaagaggaaaccaaacaccacatgttctcactcataagtgggagttgaacaatgagaacacatgggcacagggagggaaacattacacacgggggtctgtcgcaggatgggagcaaggggacggagagtgttaggacaaatacctaatgcacgcagggcttaaaacctagatgacctgttgataggtgcaggaaaccaccatggcacatgtatggctgcataaaaaacctgcacgttctgcacatatatcccagtatttaaagtaagataaaactatatataaaaataaaaaaagaaaaagaaaacactgatttttaactgacagattatgtccccctaattgcaggcwttagaataatttaccattgtgataatgcttgaaagttggattatattacagacctgtaagacgkcattagactttgagtcaaaagtattcattcattttttttgtgtatttttgtgttaaattaacagctttaaaaatgtttatagggatacatagtaaaayagctatatgttcatgtgtgaggattggataagcatgtgaaatactccacagaatttgtgctcaattttgggacttcacctgccttgctatgaataaagtatgtattcttaggatacataaacttgtatattattttaatcttaatatttctaatcatctcttacrcacagcctacttctttctctataactgatggtgattaattgcctaattacttgccccatatgcttctcattattttgtgttgtattagctttcttttttttcatctattgaattagagtaggggaatttaaagttcccagacagtaygttatggttctttgtatcctctgaagtccctaatacagcactctctccatactgggctatgtgatacatttggaaaagcatgaggtttgaagttcagacttcaaattctggctgtatgtgttaactcagtacacttgagaaaatctcactcttgttaaactcttctataacatcaggctggtgtggtaagatcagtagcagtctatgagaatcaagtgagaaccatttgcacaaaataattgtataaattccagatagctataatatatactgtagaattcttcattagataaaatgatcatactaaagagtataataacttaaaaaatatagacagctattattaatgcttgcaaaaattactatttcaatggaacttactttggatttattcatttttttaatcacatcataggaaaactaaacagattctaactcatttagttgttccaatttaactttaaaaggaaatagaaaaagcaaaggagcaaacaaaaaaaatcctgtgattctaatgccaccagttaaatcatagtgttactggtggagggggtacaggttcttgacgtcttgaacaaagaattagatgaaaatgcacaaagcacggaaagaatgaagcaacaaaagcagagactaattgaaaatgaaagcacactccacagtgtgggagcaggcccgaggatagagactcaagagccctgttacagaatttttgggggtttaaatatcctctagagatttccactggtaactttgtgtatgccctatgtaaatgaagaggatatttcctgtcataactgaagtgtttccatttgatttagttctaggaagtccttaggtttccagcctccaggttctattctcctgcctcgatagaggctctttaaattcacgaaaatcattagcccttttgcactgtatatattattgttgtatattttccctgggtgttatattcatattgccttcctttacaccygaattctgcttggatgcgtctcctctgtgttcttaaaacaagacaggtaattcctattatgttgcatattataatttcttcttattgtactttccttaactttttattctacaggactaagagctctgtgagtgaagggaccatgtctaccttgcacactaatatattcaaaatgactaattatgttcagctcatagtaggatctcagtaaatattggtcaattatataactgcagatgtacagcataattaaatatatatgcaggcccattgtaaagtggttttattttagaagcaggaaaatctttacaatccaaatttaaatttaacctttggaagttatgctatggggatgtggctattggcattcactaggcaaattcacctaggattctttttttccccagaaaaggaaaaaaaaaacaagctcaaaccaacttaagaaaaagatgttttattttctcttttaactgataagtaaaggatactatgtggtttaaatgaagtaatcatggctcagactcccatctccccacgtgttctctcaggttctcaagtaggctttcttcacttagcactgtgtcttgccttaaggccaaactttgcttcttgccactcataatttagtaagaaacatggctttctcccccatgatatgtatataaatatgtagggaagaatttaactagccctgtgtgattctagtgcccatatcttgaccaattgctgtacccaacataagtatggacagggttaatatgcttagatacctttctaccactatagtaaacagtctcacagaactcaatagattggggaagcagtgattttggatggaaggcatgagaaacaggtaaaaagcatttcttcactatattatgtctctttaggttttgcctttatgtggcaaagaaatagaaaagtctccactaaacgtttcatttagaccatccttgtraacaacatgtagagttctaccagcagaatagtaaattgtgaactctttcatttaagaaatatatcaaagaattgaggtgctttttagccccaaacattgaaaatacatgagacaagtgaccatgtcagagttaaaacttggttttagataggtactagctaacaaccacaacacctagtattagatgcttggaaagcmacaaaaactctttcctcagggaagcattgaggatttagatgaattcagtgttatttataaagtgcttattatatgttctttttattttaatatcataagtaatatatttttatactttaagtgactaattatttgatttcatcgatctattaacaagtgttttgagttacttatcagagaattcatcataaaacacatacattaaacatctattttactactataaattcttaaacttgatttcatccagtagttcttatcatgtaatttcgaatrcaatgtaatgtagtcagaaacgtgtagaatatcttcatttaaatttgtcaggcatcacatgaagttaaaactcatagtggtctataagaaaaagcaaagaaaatactgttgcctcaaacagttattttaacagctgagatttttatattgaaataaactaataagaacrtttagtgtttgaaaattatggtaggcacttgaaatatttatatgttaatagttaaatcactcaggcaaaattgaacatatttataaaaaatttattctaaacatatggaaggaattctggattaaccttcataatatatttgaaatacgatatgttggaaattaactgggcttrgcttgtattcctagtttgggctctgagacacgattgaaataattaatttcaacaaagaatatagaaagtatgaacatgtgttggctttcaaaatgtgaacaacgtggtgaaattattagatccttgggtggttctggtcttaattcatagcttaaaatattatgtagtgagagacttatatgctttagttttttagtatcaataacgcccttgaaacctttctttgtactcctcaaccagacctaggtgttttctccttaaactgaaacattcattttcacaaaaaataaaataaaataataaagaatagtcaagaacttgacattattttttgattagacttgttgggcagaacatatcttttatagaatggtatgttgtaattgatttaatatggaaagagagaaaaacctcttatataaagacaggtgctttgcaaatttcagtgttcatacaaataacctggagagtttgataaagtactaactgattcttggattccacttccagaggtcctgattcagtaagtggtgcctgagtgcttgcatttctattatattctcagatgatgctgatgctaatggtctgtggagcacattttgaatatcgcttaggtagaactactttggaaacaaaactatttcctcctttaaaaattaaactacaagaattaaaagaacgcacactaaaaacaygtgttaaactaaaaacaaattgtaaaaaatttaaatgaaaatattaaaatcaagtcaaattatttatgatcatttatgttaattatataatagaaaaattctcatttattcaattaaagttatttaatgctttttcatggtctgttcatatctgattttcattatggtgaagtaaaaataaaggatataggtgttaaatatactgatttaaagtataggacatgtactaacaatgatataattttttaaatttggcatttaagcttatttctatattgactatatatagctataaaacacatccctgtcatgagtcaacttgatttttttctaggacaatttaaagtatcagttcaataaactagcttaggtacatagtttactgctttggaacttcaaagtgacagtcaggtacaatcaatatgaggaaataaaagaaggattcaattctcttgttactgataagttcaagaatatctctgtaaaagtaattgctaaaccagatatttttttaccaaaaaaaagacaaacttaaaagcccaaataataatttatatgtaatttaaatgattaaaatcagtcataagttctttccaaaggaaataacaatttcagaaaagaccatgatttttaaaaatttcaagtgtactgtaataatacaatctatgatgaatgacagactgaaatagtgaatcatggagcttggatattatcaagaaaagacaataaaaaataagtaatttcttatggacatttaaaaacttacagctaaagagttttcagtgtttttatgactttttaaaaattattctcagtcatgattagttagtgctaattcaatctattaagttacaatttcaaaaaggcattttataaaatgtaacgtatatttctacagaaatttaaattctatcttctgatggtttgcttatcaagtaagcccatggactttgtaaaattgaaatcaaggtttacatcactctgaataagctggaaaaataccgtaacctgcagtaggaaaatcaaagatgaatgaatcaaatrcttattctgcttaattcatgcctctgatcattttaaacttaactaattggtattatgagttcccaactgaacatgtgttattatataactgcattcagtatgtattttgtcttattagaggttacatattgctttttatttacatagctttattaagatgtgattggcatacaataaactgcatgtttttaaaatatactatttaagttttgacatatagacccatgaaaccattaccaagattgagatagtgatcgtaacacctcccataattttctttaattttttttaaaaaatacatttgactgtgtatatttgaggtttacaacatgttatgagatacatatagatagtaaaatggttacaatagtgaatcaaattacagtatctgtcatctggtatacttatgtttttgtaacaagaacagttaaaatcttatttaacgaaaattcctaacacaaaacaatgttatcaactatagccctcatgttgtacattagatatctaggsttgttaattttatatcttttgacctaaatctcctcattttctccctgccccacctgccatggtagccactttttaattctctgtctctatagggttgaccttcacttttttagattccacatataaatgcaatattattctttctgtgtctggtttatttcacttaacgtaatgtctttccagtccatccatgttgtgtcaaatggcaggatctgattttttttttaaacgctgagtaatattttgttgtatatatatcacattttctttctccatttgtctgttgatcgacacttaggttgtttccatatcttgacaattgtgaatgacactgcaataaacatgacagtgtagctatctttagggagtggtgatttcatatcttttgagtctattcccagaggaaagattgctgaatcatacgctagttctatttttaatttacataggacctttgttctgtttttcctaatggctgcaccaatttatttttttattattatttctttattttttattttttaaatatactttaagttttagggtacatgtgcacaacgtgcaggtttgttacgtatgtatacatgtgccatgttggtgtgctgcacccattaacttgtcatttaacattaggtatatctcctcatgctgcaccaatttaaattcccaccaacagcatgctatagtttccttttctccacaccttcaacaatatttgttatctcttacctttttgataatagccatcctaacatgtgtgaggtaatgcttcacagtggttatttgtatttgcctgatgattactgatgtagagcactttattatatatttgttggccatttttatgtcttcttcagagaaatgtgtattcaggtcctttgtccattttttaattggatttttaaaatttttctgctgttgaattttaagagacactccaattcaggagattgggggtggagtggatcatagaggggtggtgtggtgggacactgggttggctcaggtgtctacctcactgggcctaggttcaagtagtcaggggacagggtagacattagaatggggagatgagcctctgaggcaccttgttcccagagtagggagctatagcttggctagggaatgttgcagtatcatgtgtgagagcatggtgcaatgatggcaaaacctccgggatgaaggaatgcagtggctactggccattagaacataatgcactctagcagtggctctgggttcagaacgtgatagtgcagtggcagcttgggtcatggggttcagggcacaatgtgggctccttctctagagtagtacagccatgtgaatcccaggcaattccctaagctgtgctcaggaactgtaaagactgcaggatcctccagtagcaaaaattgcaggtatccgtggtggttgatatggtttgactgtgtgtccccacccaaatctcatctcaggtggtgatcctacatgttgagggatagacctggtgggaggtgactggatcatggggtggtttttcccattatgttttgttgatagtgagggagttctcacgagagctgatggttttaaaagtgtttggcaatccccttttcattatttttctctctcctctcgccatgtaagacgtgccttgcttccccttcaccttctgctatgattgtaagtttcctgaggcctctccagccatgtgtaactgtgactcaataaaaactcttttctttataaattacccagtcttaggtagtatctccatagcagtgttaaaatggactaatacagtggtgatgagggccactgagggtctcttacttgcctttctctatctggagaagccccttgtgatccagacttggggatgggatggcagaggcaatgtgttttcttctcttcttatgtgaccatcctgagtttctgtgctccacagggtttacctcactcctttgctgcactctggcactcctctttagttactcaggtcaaaatgcagctgcttattcattagtttggttcctgattgttggagagtgataagtgttaggcacacctctagtcagccatcttgctgatttctgtctcagaattttcttgtgccctttgtaaatcttctttcatccctcctgctgtggctccacacagccactgcttagttttctgtcactaaacactaattagcatttcttagaactttatataaatggaaacatatgtagtttttgttgtctggcacttttcacttaacataattattttgatgttcttatgtactgcartgtgtatcagtaggctatttattctaattgtggagtagtattctattgtatagataacacacactgtatccattgacctgctaatggatatttggattgtttacagtttgaggttactgaaaataaggcttctatgaacatgagtgtaaatagggacgtaggtatttatttctcttgagtaaatacttaggactgaaatgatatggtcaggacaggtttaaatatttaggagacttccaaactgttttcaaacaggttgtagtatttcacatttctaccaggagcatatgagatttcctacccaaaacttggtacagtcagactttttagttttagccttttagatttgtgtgtagtcatttttctttgtggttttaatttgcatttccctattgttgagcatctttttctgagcttatttgctatctgtatatcttctttaatgaagtgtcttttcatatctttttcctatttgaaaaatatgtgttaattgagattttagaactctctctatattttggatacatgtcaattattagatatatgctgtgaaagattttcttccagactctggctaatcattttattctctgaatggtgtcttgaaattaagtagcactagtccttcaaatctatgattttttttcaaagacatctagctactttatgtcctttaaattttttttaaattttagaatcaattgatcaatgtctctcaaaaatcctgctaggattttgattgaaatacatgtaattatagatgaatttgagaaaaatttttatcttggcaatatttagtcttagtgtccatgaacataatatatctgtttaggtctttatatamgcaatattttttagttttctttcatatttctgtcagatttctatgtattttgtatttttgattttattgttagtgatattattttatttcaaatctatttttttcattgctaatgtattgaatacaatggagttttgaatattgatcttgtacaaactcgttaaataacttattagttctagtaatttcagattttctaacacaatcatgtcatttgcaaataaatacagttttatttctttctttctgaactagattatttttatgttttattcttgccttatttcataggctagagtcttcagtacaatgttgagcagcagtggaaacagcagacatccctgtttttttctttaatcttcaggtgaagcatttagtctttcactattaagtatgctgttagctctgtgtatgtatgtgtgtgtgtgtgtgtttaatatatatttagatatcctttatcaggttgtaaatttcctttctgtttctattttgttgaaagtttttatcaggaatgaatattggaaaaaaaggcaagtacattttcttcacttttctctccctcccctccgtgcctctttcccarctaaaagtttatcaatttgattaatcctctctgagaggcaaccaaatgaagccaaaagttacatttactttctttacttgtatgctattttatttagttccattctcatctatgctatttctcacattaggtttcatttgctctttttgtttacaggttcttcagctgaaagctggatggcttttttttttttgagaccttattttttatttatctctaatatrggtgtttagtgctccaactttctccctaagtattgctttcacagcatccaacaaattgtatatgctgtatattattttaatttggtataaaatactttttatgttctacttttatttttatttgacccttgaattattttataatgttattttttcccagcagttggagattattcagggatttttctatcactaatctttattttaattttatttggtcagagaacctactttgtatgacttgaattcttttaaatgtagtaagatttgttttttggtcctgaatatgatctctcagtaaatggtctctgtgaactttagaggaatgtattgaactgtttttggatggagtggtctataaatttctggtaggtgttgttctagtcttctacattcttatagaatttatgtctacttgttcaaccagcattgtgaggtagttttggaagctctgactataatggggcattttcaktctatcagttttgcttmatgtattttgaagctctgttattagctgcaaagcacatttaagatttttctgttcctttgaactaacaaccccctttttcaatatggaataaatttctttatacctggtaatattccttgaatgtattttggctattattaatataacctcctctttttatgtagttaatgtttgtattatatatcacctttcattattttatttttaatctatgactttatatttgcatttctctataggcaatatatagttaggtctttcggcttgatcagatttgacaaatgagacattgtgccttcaagatgggctgtctcattcacccaatatccatcttagtatatttattaattttaatgtgtgcatggtattctgttatattatcaactggccaagtagtttctaagcaacaagcaactgccaggctacatttccacattttcatggatttgaccaataaagaataagcccaagtggatttagacagtttattacccatgacaaagcaaacaatatgatcttcatgttcacatttctacccctgcttaccctccgcaagtctcatggggacaatatagaagagtgcaggtgaatactatgcacataggattatttatcactgagaaggaacaagtgtaatcttataaggagactgataacaaaccttcccaacctttgctacacaggggaatttctcctttattaccccgatcaggaaacaaatctgtcctctctcctagaggtagacactacctttgttattccgaagtgcttctagggaggagagagagactttagccttagtaccatggaaagtaagcagatctgttccttgacctggagaagctttgacaaagctgtcaatgccctttcttcagaggttgtgtagaaatgtcagacttacagggaattttctcccaacatatttagaagtatcggttacttctttcagaaaaaatgaagctactcagtattttaaggaaaagtttagtagaagaaaatagaagcgtatgcagtggctggaggagtagggctagcaaatgttaggcccattatttgctatcaggttatctggacgtgcagacagagccaggtaagctgatgctgcagatctgtactgctggtggcataaaagtgtttaattatcaggaggatgcctgaaagctattgggaaaactccaggtcttcagcctgctgtctgccaatgcccttgtgcctgtcctcagccctgccagagaataatggcttttcttactcttccacatcccaaatctcattcaagtgatatttattggcacaatctagtggcattctggaatttgggtaggatacctctcaagctcttcccttgtattttaggaaagtatatagatgaaggagagtgatgttgaaattgaaaacaatctgtggaagcctttattaatgtaattctaacatcttttctcttaccacaatactttagtaaataaccttgtacatctcccttttggcacatgtgggaggatttccactggatagatgcctagaaacgtaatggctcacagtgcrtgcctatcatacattttgatagatgataccaaattactctccaaaagcagttgctttccagggagtaactgtaggagaagggaggagaaaaaccctgtttgtagatgatttagaagcacaagttagtactcaagtctccttcatggacactgactcagtgcctttgggtggtgactctgtgaggcaatgggagggaagaagaaagtgcaatgaccccacgataccttattataagacctaacatctagcatcaatctttgaaccatcgagaaagaaagaagaaatacaggattgaatgtcttgtctcaggtcttatgccagcagcttgtacatggattttccaatttaattgtcaatgtaagtctatgaaatatattattctccccatctttcctggtgaactattgaggggtagatgccaagtagcttgttagagatcatgcatttaacaaatggtagggataagattcaaaaccagctgggaaaaattacaaaatcygtattttttttctatatctcacagaaatcttcccttcttggtaaacatccttgagcctcctattattcttttatggctagtttactgtcttcaaggctgcccatgtgtaccggagagaatacagactctggagatgtaaagacttgaatttgaattaaaggttgagtcccatgttcaccatttattatctgtgktacttttgagcaattcaattcagctctttaaatttagtctcaacatctataaaactgctataatgaaacatgcttggcaagtttgttgtgagcattagagataatatatgcaatgtgcttagcatattgttacagcattaattatgtatacttatgtatacattgcaggcgagctgcccgcttccgggatccactaggcaaagccagctgggctcctgagtcaggtggggtcttggagaacttttatgtctagctaaaggtttgtaaatgcaccaatcagcacttcgtgtctagctcaaggtttgtaaatgcgccaatcagtgctgtgtgtctagctcatctagtggggacttggagaacttttatgtctagctggaggattgtaaatgcaccartcagcactgtgtgtccagctcaaggtttgtaaacacaccaatcagcaccctgtcaaaatgggccaatcagctctctgtaaagtgggccaatcagctctctgtaaaatggaccaatcagcaggatgtggatggggtcagmtaagggaataaaagcaggctgccccagccagcagcggcaactgagtgagctccgcttccacgctgtgggaggtttgttctttggctgttggcagtaaatgttgctgctgctgactctttgggtttgagccgcctttatgagctgtaatgttcaccatgatggtctgcagcttctctcttgaagccagctagaccacgaaccccccagaaggaagaaactcccgatacgttggaacattagaagtaacaaactccggacatagcatctttaagaacggtaacagtcaccacgagggtctgcagcttcattcttgaagtcagccagaccaagaaaccaccaattgtggacacatcrggattggcacatgttgaatgctgtgagactagatgccaaagtatgcakgtgttgtgaattatgtttacaagatgttataaatatgggcygataaagttgatatttataattccttaaagtcacrtattaaatctgatatattttatytcttcacaagtcaaaataaacttagaaagttttgagaaacaaaaatatagactagaatattatatgcatgtaagactgtacaaatccagtctaaaatgtaattaatgtatcattgtttcctccttgggaaaattatccagtagtactccaacattatgtctttttctgtctagtcctaatgcagaggagacaggaaatcagaaacagcttaaaacccttggtgatgtactagtgacagttgaattagaataaaatatgtgtcttttgactgcttgctaaaaatgtaaatgattttttataattttttttgacttcttagtgccagtgtgtttacattgaccaaatattttggtgaaagttttgtatattttttttcaaaatgttaagacaataaaaatatttgagttcaacaatgtattcttagaaatatatttctagytttatagtgcttaagtttattagaatatgacaataacatatgccaaatcaatgcttaaattgatactttttataattttcttgatcttgagaagtcttaaaaagaggtactatatttttcattataatatataaagatacctattgattataatttcatttggcttaggaatttccctttgaaagaaagtatcattttggatgaatgtagaatgtatttaaaaattttaaacaccgaagagataagtttatacacttggactctgttattaataagttatggccattatctcttccttgccatggggagagtcctagttgttgttattatactgtcatgtgtcacttaaagatgcagatacagtctgaaaaatatgtcattaggctgtttcatcattgtgcaaacagagtgtacttacacaaacctagatgatatagactactacacacctacattataacgcagttgtaatacaatggtaawatatttgtgtacctaaacatccctagacatagaaaagataatgcattgtgccaagacattaatgttagctatgacatcacgaggcagctcgtttataatcttatgggatcattgttgtatatgcggtccattattgaccaaaatgtcattacatggtacagtcccacacttgacgtgatatagagttcatatgtcactttttcattgttactgattttgatcaaccaagttttaaatatgtactgtgaaaaatttattttcacctttattttgaagtactgtgcatcatttcrtagcaaatctatggcatggatatgcaggaaaaagtggataaaattatattttgacaacttcctaaattattatgtctctcagagataataatgatcagtggtatatatactgttctactctgagatagcccaggggcatcccaaactatgagggtttctgtgacactcatacagataaactaggtccataatgtataaatattaatgttggcattcacactgaggctgggcttttgcatttccacaccaaatagttatcttttaaaaacataacattacagatacattttggcctgaagrtattttcataagttccctatttatatgttgttgatgaaattaaggattccagtaaatcataataatcattgctagtggaggagaacacagtaagattaattccaattttgtggggaagaaatattttacatatggttttagttatgtatttagttatggatgactctgatgttctgaaaatgtattgcattttaaccaaaagcgtcagaatataatacattagttagtacctcagtatttgaaaggcagtgaaaaccgttggctgtttttagacatttgtgtatattttgatatatatgtcaatatttaatagaataaatcttatgtgttaaaatgttctcattcctgaacacactaaatataaaaactttaaggaaggagcatttattagtttgctaaggctgccataccaaattatcacaaactgggtggcttaaaccaatagaaatttattgtctcacagttttagaggctataagtctcatatcaagatattgacagagctggttccttctgagggctgcctctcccctagttcttgtggttttctggcaatctttggctttccttggctcatagaagcatcaccctgatttccgccttaattttcacatggtgttctccctgtgttttgtgtttatccaaattttccctttctgtaataccagttatgttcgaataggggcccatcgttctctgtgttgaccttatcttaactgattacatctgcaatgactcttttcccaaataaggtcacattctgaagttttaggagctaggacttcaaaatataaattttggggagacacaattcaacccatacagagggtaatggatacttataactaccttcttaaacatggatcttgaaattcaacttgccttttcccttcctctcaactaaattttttttcaaaacctgaatttgaaagaaagactccacttaaccgtttttaaattttaaggcagaaataacacataagcatactggagtaaaagtgtgtattctatatcctgtgtgcactccacaactatatttagtaatgttgactcctcacatttcctaagttcttttaaaactgtacaaaatatttatttttacattgctttctgaaagctgatatgttatttagggatcttaataaataagaacaagrctagattaattcaaagaaatttaaggtatttagattaaggtttacactttctgtggataaggagtttgagcagggattagttgggtcctctattagggtcccacaaggctacagtagtggtgttggccaggccacggtgttatctgaggttcgtcacccaaactcatgtgatcattgacagaattcatttcctggtatctgcagaactcatggaggcttcaatttcaagctcaaaaggaccatacctttctgatgctttaccttctcctaaagggtcctctgattggggactgggtcagaataagttatttctaaaagattattaactcaaagacaaccaattatcaagctaagcacacgatatcccattaaattcacagtttctgtccacagctcaaagggaggagaatatacaaggcatatacaccagggagtggaatcttagaggccctcttagaattctgcctcttatagtaacaaatatatacattatcattaagaggtagataactaatagatactattaataaaaatgattcatgcataatgtaaaattacacaaatattaatgtttccattaaactcctaatatgtataatattctgatctagaaaataatatattctcacttcttattwtgcctttccaatttatttcttcttattttatttcatttgattcctgattgtcctgcttctgtagaaaggtttcaaatgtggccattctatgtagtctattgtttagaatttttaatctgttttataataaagaaaatascttgctttttaggcttatttctctatacataaatcttcaccttatgattttgttgattttttctctatgggattctctccccatttcagctcatttgttctgatagcatcatattaaaatgcagttcttgcatcaaatagtaccgcctccaagatagaatcctggattcctgtagttatctataataactgtattttagtatgtttactgcaattgaccataatagaagtgtgattaattttattcatatttttatatatttatacttagacgtttgtttccattgcatcccttactagataataaaaatgttgtgaatagaaatcagacatagtgtgatcatgtcattttcttcaggcttagtaagagttaaattgtttcacttttcactgtagttgatattrattggtttatatatttgttttgtgagttaacgcatataattaggccaagttaaaaggaatcatatgtcagttgtattcatatttaaatatgctgtgaaattttctagcctgtcagaaaaagattataccagtattactatatcaataatacacaaaaaagtctatatagttttccttttgatagaaagaacaaaacttattctgaaagaataaataaaatgttcaatctaaagatattatcccaaccttcaaacttcagtgggaatacatgacacaactattttagaaggaaaactatagagcattgtatcagtatgtggtatcttatatgccttatagcacacaaatgttacccaattgagatattcattaggcactagatacctgtctctaaatctagctatcatagagatgtttcgcatggagggacactcagaaaacatttatgaataagagtagattcggctactgaatttagataaatgcaacccagttggatgtgtactttagtaatcagtggcatattagagtcattgaccttaaaatactgaactcatgttttaaattattttactccttacttgggtgacataggattcatattgattactgtaatttggattacagaagaaaaagtgctatttattcacatagaatatcaattttaaaatgtgagrccaggcgcggtggctcatgcctgtaatcccagcactttgggaggccaaggccggtggatcacgaggtcaggagatttgagaccatcctggctaacacggtgaaaccccgtctccactaaaaatacaaaaaattagccgggcgtggtggcgggcacctgtagtcccagctactcgggaggctgaggcaggagaatggtgtgaacccaggaggcggagcttgcagtgagccaagattgcgccactgcactccagactgggcgacagaacaagactccatctcaaataaataaataaataaataaataaataaataaataaataaataaaatgtgatttcagtaagctgtaattacaaaagatcgcaaggaatctgccattctgagtcaaaaattttactgcccttctcgagtcatgcccaatcttcttgtcttaaacatgtgagaagaatatttgtgaacaactatcagctactacttcatggtgattgcttaaacgtattcatacacgtataaatagatacatatgatataaatattttagctctttttgctttctaaggctgacatctgacagtgaggccattgatcttcagttgctagaaaagaaaaattttaggctagtctaccacttgagtgatttgcttttaaaactatgagaatacatagaagtcaaatcaataattaagcagtacaacaataaacttcatgttagtattatgatgaacatcatatttttatgtgaaaagctacacacataayaatgaaggcaaatattatcaaatttattaatatgcattgaatagcgctagagtgtacagaaggcagatcgacctttatctcattacattaatgagatgagaaaaatttgaaactcagaagattgccatcagttgatattctttttttgttgttgtttctttgagaccaagttttgctcttgttgcccaggctggagtgcaatagcgtgatcttggctcactgcaacctccccttccaggttcaagcaattctcctgcctcagcctcctgagtagctgggtttacaggcgcccgccaccatgcctggctaattttcttttcttttcttttttttttttttttttttgtagagatagagttttaccatgttgatcaggctggtctcgaactcctgacctcaggtgatccactcgcctcagcctcccaaattgctggaattacaggcgtgagccaccgcgcccagcccagttcatattcttaacaagcaaatgaaaaaagctgtcaaatgacaaaattactgaaaaaaatgaagctctgttgcctttatttaatgattgggctatttggttgcaaacactttattctactctctttcttgtgatatatgactgctaacatgtaaattcagtagatctttttagtatgtgaaccagaggttgaaggcacagtgctttagtcctttgaagccttgatatccttataagatcagttggatttattcaaatctcagttggttgctttgagagaataaaatgatcccaggggtagaagatatccatttgctaatgtctaggctacctggtatttaaaaactgaaacacatttttttttttctaaaatgtaagttcttatatgattggtatattttatttttgtgtgtattaattaataagccaaacctcttaaggatatttctataataccatttcatatgaagaaagttatttcctgttcattcactaaatacatatatggatgaacaggatataatatataattatatatattatatatttaaaataatactttaatatatgtagaaacaggctttatatatattatatatttaaaattatatatacagcttatttctgttatcctcaaaataaaaccactcacgtggcatgaaaaggagtcttaatatcttaaagggagatatacttggcctcttaaatatgattagcacatttattatagaaactttctcacagatatcagatactcaaatttttcctgactttttacactctttcttaatatatctcttttatttaccttattttcactttgattttcttttaaatgatagctgtagacatgccaataacaaatattttaattgcgtgttcaataaaatgtaatttaaaattgctgagtttatttacaaataaaataccttaagacttaaaacaacaacaaaaaaataaactatttagttccacatgaagtttttgtttatctcaaggtaaaattttagtttatagaaaagttttagagagaaactattgggaacattggtggaatactaaaaagatcattattattttttaatggtggaaagcataatctaaatttcttgttgataattcagtaggacagggtatttggagaacggggtatatttcatcacttaaaagacaagataatcacagaaagcagccatcagttttagcctttctcatgaacaaagacagmaaatgagtaaacattaatgtgttggaactaccaatgaraagaaacttaggcagtataagataaacttattagatttatgacatatgcaactccatttttaaagcagagaaattccacattaaaacaaaattcttataattttctrttgcttccctccaagccacttcattctccctagtgtaaaaaggtcagtcttagaatagcttatgtatttttgcttccaaatgcaasagaaacttgtagacagaatatatggctccctatatagtagtatttgagaaaccaaataccataaaaaggctrtcttttgcagacataatccccttaatgtttgtgtgtggagttattccttttggataatacgtactctgttaaaataaaatgttataccagtctcttatcagacaccagcatattagctggattaattacctaagaagggtcagagtggtgagggccagggcatagcattggtgtattttgacagggaagttaaaaaaagtcactggcctctgacttagaattaaatgaaatacagcaacccaataatgaattctgagtatccagggaacaataatactytaaagcaaactcagagatcacaaaggggcatgacaggaatacacccaacggtacacaggcactggaagaaccttgtactacatttatactttagtcttaggtgtgcccaaaagtataacatacagttctttgatacaagtcccagaaacctacttttgctcacttcatgaaaaaaagaaaaaaaactggttattggaaggatatgaagaggcacacagaaatgaaaagctaaacagcactcaagtcaggcaaaagatgggaatcttagagaactgagatagaagcagggcyagcctcataattgaagggtccagtgcaaaatgaaaatgtagtactacttgttcagaaatcactgaaaatttcaagatggtgacagaagaatatattaccaaatgtagtatcctttcaagagbtgggcatctcacaagttcatgaatctgaccatgggtggcaggaattaatggataagctccatagtataaatcagctactatggttttctgtcttcgtcctttgttgctactaaagattcacacttctgggaaccataatctagggatttagaatggtgaattctttccagaaggttttcagtttactttgcctaaattcatcagaagaatcactatctatggcagctatagccacaggggaagagagcatgggaccctgtttagcaagactgcatgcaatcatggagaagagtaaggagtttctcgaaggaacataaaggaactgttaacaaaggacgtgatttcttcctgtgcaggaaaaaacaaacagacattcacatggaaataaaaaaataaaaatcctttcttacactcctrtgaccagcttctaagaagttggctctaagaacatgaatagtttatttaacagtgctcctgtaacatctccattggatcacagatactcaggtttaaatactggcatatctcattttattgcaccttgctttacacagtgcttcccacatactacattttttacaaattgaaggtttttggtaatcgtctgtcaagcaagtccatcggtgctagttttccaacaacctgtgctcactgtgtctctgtgccacaatttggtattcacacaagatttcaaactttttcattattatattagttatggtgatctatgatcagcaatctttgatgttactattgtaattgttttgaggtgccatggactgtgcccatatagaaatcaaactcagtggataaatgtgtgtgttctgactggctattcccctatatctctccctgtcctcaggcctccctattccctaagacacaacaatattgaaattagatcaattctacaatgccctgtagatgttcaagtgaagagtcacatttctctaaatttacgtgaaaagctgtaaatgattaagcttggtgagcaaaacatgtcaaaagctaggcatcttttgacaaacagccacgttgtggatgcaaaggaaaagttcttgaaagatattaaaagtgctacttcagtgagcacaggaattataagaaaataaaacagccttgttgctgatatggagaaagttttagtggtctggataaatcaaatcagtcattacagtcccttatgccaaagcctaatccagagaaaagccctaactctctttgattttatgaaggctgagagaggtgaaaaagctgctgaagaaaagctggaaactagcaggggttggttcatgagatttaaggagagaagctatctccataaaataaaagtgtaaggtaaagcagcaagcactaatgtagaagcacagaaagttatccagaaaatctcactgagaccattgatgaaggtggctacactggcaaacagattttcaaggtagacaaaacagacagaagatgccatctgggactttcatagctagagagaagtcaatgcctgacttcaaagcttccaaggacaggctgactctcttgatagggactaaagcagctcttgactttaagttgaagccaagttttatttcccattctgaaaattgtagggcccttaagaattatgtctgtgctcaattaatgaagcaacgaagcatagatgacaacacatctgattacaacatggaacactgaatattttaagcccactgttgaaacctactgctcagaaaaaaacaagatttctttaaaaatattactggtcattgacaatgcacctggtcaaccaagcattctgatggagaggtatgaggagattaaagttgttttcatgccgtctaacagaacatccattctgtagctcatggatcgttgaggaattttgatgctcaagtcttcatatttaagaaatacacgttgtaaggctagagttgccagagagagtggttcttctgtttgatctgggtaaaatacattaaaaatcttctggaaagaaccattctagataccattaagaacatttgtaattcatgggaggaggacaaaatatcaacatcaacacaaatttggaagaagttgattccagccctcatggatgacttcaaggggttcaagactacaaagaccagtgtaggaagtaacttcagatgtggtggaaacaccaagagaactagaattagaagtggaccctgaatatgtaactgaattgctgtaatcccataacggttgcttcttgtasatgagcacagaaagtgttgttttttttttttctttttttgagatagattctactcttagtgaatatgctgtgaatattgttgaaattacaacaaaaaatttagaatattacctaaacttagtggataaagctggggcagggtttgagaggattgatacgaagtttgaaagaagtttaactctgggtaaaatgctaccaaatggaattgcatgctacagagaaatcttttgtgaaagggagtgactagatgcagcaaacttcattgttgccctatttcaggaaattgccacagccactccacccttcagcaaccaccaccctgatcagtcagcagtcataaatatggaggtaagacctctcactagcaaaagattaggactcattgaaagctcaggtgattgttagaattttttagcaataaattatttttaaattaaggcgtgtacattgttttttagacataatgctattgcacgcttaataaaatacagtatagtatacacaaacttttatatgtgctaggaaagcaaaaaaattgtgtgacttcctttattgaaatatttgcttattgcagtggcatggaacctaacccatgatatctctgaggtatgcctgtataccaaaattattaatttcaatgattctaggaaacttttttttaataaagtagtttttggttaaaatttccagtatgttacactcttctaacaaactgtcgaagaataagagaaaaaatgttttagactgggtgtagtggctcacacctgtaatcctagcactttgaaaggccaaggtgggaggatcacttgatgtcaggggagttcaagaccagcctggccaacagagtgaaactccatctctaccaaaaatataaaaaaattagtcgggtgtggtagcacacgcctctaatcccagatacttgggaggctgagtcaggagaattgcttgaacctgggaggcggaggttgcagtgagccaagaacaggccactgaactccagcctgggccacagagtgtggctctgtctcacacacacacacacacacacacacacacacacacacacaaataaaataaaataaaagggagagagagaaaaaatgttttaggttaaatacaaataaaagagcttataggaattactctgaggtgaaactagcttatatcctctaatcagtatgtattcatggcttttagagtttggcttaagaagcttatcgaggatttcgccaagtggctgtctctgaagggagtggaaatgttaggactcacactctggagccagactctgggtttaaagttctgttttgctgtgtgtatcctgttcagtctctacacctaggaaaatgttaatataagaattgattattaaaatatctctaaaggtgacataatttaaaatacaattattacacataaaacaatttattcttttcagaacagtttattcttttcagacatatgtttcatatgtatgaaacaatacatataaaacaacgtagtacgattatttggtggaggtatgtcttaggaatggaacttgattttattggggggaattatttttttttctgttatcctttctaaatgggcagttatctctgaagaggaaagagcaaaatggagcttttattctctcacctcttctttggttgtattaagaagagggctgagtttttattctcatctctgtttcaaagacaattcaatgttgataccaatctgtgtttctgctgcttgtgtaaaagaaaaaccatcctatgccaccagcaaccactgttatctggttttaaatgtcaagtatacttcagcatagaaataaagaaactgagataacagtcaaagaaaaatatattgaagcacaaagataagagtccaaccatcttagtgtctgtgtctttgagaaaggagttaggaaaagattcatcaacagaaacctaaaacattttgcagcttctaacttatctaaccttatgatttatagccatgtatcatgtttatacatatgattgtagtatttgtstatgttggtgctatactgatgaataatggaaagtaattcagctactttaaactgaatcgtttaaattagttcagcgatgacattctgtcttcatgttatcccttctgaggtctagcctgagattttcttactaatctcaaggatttttttgtttgttccttgcaacagatgttcatactttgacagttctattgtatataattatgtataaaccatattatgtttttcattccttatttgaaagtaatctagatgatttttgtgtgtgtggctgtgagtgggtatgtcaaggcattttggaatccttgacttggtgtaatatggaaaatctgtttctagttgaaattgaatacatatatcacaagtccttttgttacttttagaatggaatgtatgaaatctgattgggaagattaatgtaggttttattaatctttctcaaattgataaagttctgtcaccctaaagatttattcaaagttgtaatctcaaagtcataagcaccaagtctttacctttgaaaagtattggaagctttagtttcctagccactatggattatgccaatacttttaggtattacctttatgccaaattacaggacaayaattttctttttagaaacattattttctagactataattttttggctaacacttatagctcttagattgccacatcttgaatattataacacaaattatcagaagcaaatatacatacagtaatatttttaataatgtttttcataaatcatatctaaattcccattttgtgcattcttcaaatggctataaaaattttgcatactagctcttaaagcaataatattaggttctaactattttatgtgataatgaaataggctcgattttattttagtagtttggtcctgtaagattaatcaaatttattacatgatatggatgtgaagtaagcaaggcactggtatttttgtggctcattattctgatattaaagggaagggaagaaggtaggtaacaagtggcatttaaaataaatgtattttcataataaatgatgattctcatcttattctgttacactgcaagtataaaactcttattgttgataagaagttcataataagtaaatcactttagacctggagtttgtgacttaaaaaaagcctttatttcaaaaagcaaaaataaaatgaataatgaattatcttatatatttcttccactaaacatatttcaaatgaawtatagtatgtaagttaaaaagccaaaaatacttaacccataactgtaagatctacattataggtaactacaaaataaaaatactcattatctataatatatttataaaatgttgttttcaaccaaatgttaaatagaatatttaatatagtaaaaattatttccctttttagaggtttttcatctttataaatgtatttgacagtaaatatagtaaaaactacaatggaactgaacttctagcaaattttgaaagctcttcagtatcatcgtgaaataattattcctcagatgagattttgttaaactcattactcttcttctgtaatttaaaatttcccaaataaaattactcttccatatagtggtgaatgagagggtgggaaaatattcctgatccccgcaagagaaaaatgtgcagtttggaaaatgtataaaataaaagtgttccaacacagcagatgatttatgttgtttatatgatgaattgcatgaagggctaaggagaaataattttagattaaaaaaaatttgtttgatacctcttagacataggaagacccgccaacctgtgatattttgtaagttacgaacaacttctataaatattagggggcagtaaataagagtttgatttatttccatctatatgaaatgtctttgatgattttgtgctctcaactttctgtcagttttagtgctctgggaaagaaacccaatgtattattacttcaataatagcatgattacaggcatacaatacctccaattaaataattaattagaaaatgagaaatatgtatgtgtgtgtaaacagatttggtgtgtatctttatgtgtatagaatttttaaacaataatttggattttttttgttcaacctgattgtactttcatctctacattcattaattctgattcttttcataagtgaaatgctccttaacctggatctcaagtcacatgtgaatatgaaagtagaaaatgggagagaaaaatactcatgacattaatggcatggagaaaaggtactgaacatacacagtcacgtcaaccttctctttttaagactaagccagaacttgcggagtttgtatgatcagttttatgctcataggatactttctctaaaattttggacaaagttaaaaataagcaccaaaataggtgtaaaaataaaattaataaaattttggacaaggaaactaattttagtgaatagtgggagtcgttactatttaatctaattccctaagactgtaacttaataatatttcactattctagcttcagtgaaaatagaatagataaatacaagtgtatttaaaaatgtaaccctattaagagatgatacaatatggtaaaagaacactggactagaagtcaggaaaccagaatttcacagtctctgtgtgacagttagaaaattaatttaggcttgagctttcctatatattaaatggagatattatacatgatggactattattctttttctatactaaatttgattagtctatttatatgagtattacatagaattgtgcaaggttttgtggatacattgatgaacaagaaacacaagtactgtccctgttacctccttgaatcatcgtagtttcaaatatagaaataaatagttacacagttaattatgatatttcacccttacttctagatttaatgtctttcttactggaatatatcctttagccattatcccagttagaatgccttccccttcaagtaaaagacaaacctaacacaaagattattaaacagtaaaaacaaaaaacccaaaaacataatcttgtctaacaagaagaggtagggaatccccaagttggttagttacaagaaacaatgacctcttttcttttctttctttcttttattttttttaaacggagtctcacacactctgttgcccaggctggagtgcagtggcgcgatctcagctcactgcaacctccacctcctgggttcaagccattctcctgcctcagcctcctgagtatctgasattatggtcgtgcatcaacactgctggctaattttgtatttttatttttagtagggagggggtttcaccatgttgtccaggctggtcttgaacgtctgacctcaagtgatctgcccacctcggcctccgaaactgtcaagagtacaggtgtgagccaccctgcccggccaccagtgttttttacagctgactctcctctcttttgtgggatacaccaatcattccaggcaatatatcaagacaaaacaacatccaaaggaaaatagctataatttttctgtgttttttttcttttttgccagggaggaaatgttttcctgaagccctcctacctcactctttgtcttatttatctgagtcataggagaaccagcctttaaacaaattaagaagttttgtttttgaaagaagcaggaaggaggtataaaatgaatagtgggtaggcagccaacaatgtctgcacataatatttttttcctttcagaaatgttatcaattggtttccaagtttctgggttttttttttttcatctttataatgtccttttctctgctgagacttgccatttgtttttttgttattaccatttttaatagaccttgaacatatttataatgctgattaaaattcttgtcagctaatttcaatatatgggtcatctcatttttagtgtctgtctgtaaattgtttttctgcttctttgcatgcctacttattggaatatttgacacacatgaatggatgacatgtttttcagagtctgtattttattgtcttcctttagagaaagtatagaattattccagcaggtagttaatttactagtaggatcaagtgaatttttgagcctttttaaagtttggaactctatgtctatcagcactacgagtctcctttgtctgtggcagatcttctcctttatctgcataggcgtaaaaattgctgcagcctctgtttttagaaacctcatgcaagttcaataccctgacactaccacagtggcaatttgtataattatttctattttgctttctttcatatggcacctggaagttcatctggcttttccttttgtactgtaatatgttttaaaataaatgtggttgtaagttatttagcatttctttgtatttggaacatgaggtggagtgtagatcagctcattcaaatgtgttcttagaggtcccctcaaattagttttttaaaatgcatctgtgataagcattaaaaatgaagtcttaccatataaaagaggtacctgtgtattttttaagagtggggtactagctgcagaggtttctctggcgacctgatgtttgtttgtttgttttagttatactttaagttctagggtacatgtgcacaacgtgcaggtttgttacatatgtatacatgtgccatgttggtgtgctgcacccattaactccttatttacattaggtatatctcctaatactatcccttcccctgccccaacccctcgacaggccccggtgcgtgatgttccctttcctgtgtccaagtgttctcattattcaattcccacctatgagtgagaacatgcggtgtttgtttttttgtccttgcgatagtttgctgaaaatgatggtttccagcttcatccatgtcactacaaaggacatgaactgtcctttgtatggctgcatagtattccatggtgtatatgtgccacattttcttaatccagtctatcgttgatggacatttgggttggttccaagtctttgctattgtgaatagtgccrcaataaacatacgtgtgcatgtgtctttatagcagcatgatttataatcctttgggtatatacccagtaatgggatggctgggtcaaatggtatttctagttctagatccttgaggaattgccacactgtcttccacaatggttgaactagtttacagtcccaccaacagtgtaaaagtgtccctatttctccacatcctctccagcacctgttgtttcctgactttttaatgatcaccattctaactggtgtgagatggtattttgctgatgttttataagggaagatctgaagatgggtaaaggattttttttttttttttttttttgagacggagcctccctctttcgcccaggccagagtgcagtggcgcaatctcggcttactgcaagcttcgccccccaggttcacgccattctcctgcctcagcctccagagtagctgggactacaggcacccgccaccactcccggctaattattttttttttgtatttttagtagagacagggtttcagcgtgttaacctggatggtctcgatctcctgacctcatgatcccccaacctcggcctcccaaagtgctgggattacaggcgtgagccactgtgcccggccaggatggcaggattttttttttatggagatagaacatcatatgcaaaggccctgaggcaggatggaacttggcacatttcagcgcctgaatgaaggccaatgtgtttggaactcaaagagcaaagaggcagctgttaagagatgaggttttgtgagagagacagtttctagaccatgaaacaaccttgttggctatgttaagatatttgaattctatcttgcttttccccatatcacaggtagtggtgaaataacttgtcacatgtagatttttatctaaatgtaaattttatctaaatgtactgttaagttcttataaccactacacttactatagagggaaatgctgattgcatctcttctggaaatacgatgaaacattcagttacagaataatttgagatacaagtgttttcctaaaataacactctcagacagacaatatatttggaaaggaaaaatgaaaaatataagttattcataatcaacagcctttttgtaggtaggtccttaaacagatagtttctgttaggttctgggaatgctagttcattaatatagatttatgtcattgtgctggtcttagaattattcaagctaggattaaactcaccgtaaataacctgaacctttttaaaatgaagttgaaacaacagtaagtatcctaagctaaggtttttaaaagttattattttctgcagctctacttaatgaagctttggaaggcagttgtgtgcatatgcttatttattatgccaggtaaataggggttacttacttttctgttctttggaaatttggttcagaaatcacagttacattataaagtgtaaatcattgagatgcttttggccatagacattccctataatgaaagatgtcattgcactaaataaggaaaggttcctatgacagataatgggatcaatgctatgcaactgacatgatcttgtattttgatagtcatttgggccattttattaagaagttttcaaatgatttgaagagcacttgtgggcagaggaaattctaactacccaatgatactacttagttatagctaagtgagaaaaaaaatcataaaaatattcttactttctctctcaggtaaggaaaacctttcagtttccctgtagtttgtgtcaagatatatgttttcccattaaacttgtctgccatactgacgagagaattacagcagaacttttgaactagtttgataagaaattcctttcacacaaaggatcccagggagaaaagtgcaaagccagttcaccatcgtagtttaacttaaatgtgttaagtatcagttgaaagtctcaaatcctctactcattcgaraatccacttaatataacatttatgggatttgctattaatcttatccaaaacctgtgttattttggtacttatggacttagaaaagtctgtatgtctcaaactttaaatgttactaaatcttaaattataaaaacttggttagcactcataagcaacgaggcatgtgtaaatattactaacaatttcactgaagattcatgaagttgacacagagaggatgaactgtatataaatgtgttcagcggagattacattgtctttgttttttgtttggagtagttatggtgattaatgaaccactgtatccagcttcagtatcatactctttctttttttgccaagttaaaggactatctttggtgatataaagcacatttgttcaatttcttgaaactataataattcagagttggcagacagagttatatatccccaagtgaacgaattgtattatccagtgaaccctgctaaatgcaagaacagaagagcacctgaatctttttctcccctcaccagccttaatatgttgtctgtgctagaggaaaatatggcttcgtattagagatttttcttcattttcttgtcaaccacaaggataattttaggtgaatttacccagagacacttgggtatttttctgcccaataatggctattgatcaaaacattaatattcaatacattgaacaactgtaaaccatgggcaccaaccaatcagaaagacaatggcaatcagcataaaacaggatggctgtgccggcctttgcagctgagtggcaaccccatttaacagatctttcactaactgtttcaacctaattaagaatggttttgattaccatagccttgtagcagatctattttttcatgtagagataaaatgttttgagataaattgatttgtttctcatatgtgaaagaatattagttttttttggtatcaactactaaaaagttaataattgtggtgaacctcttaaagtcagtgacagaatcctattaatctytgcaacttcagccatcactgctytgctggacacaatgtggatgttttcaataattttggaaaaaaatgccatcatcttttccttttgggattaaaaatatattcaaattattgaagtatgaaaaaatgactaattttattttcaaaatgcatttctgtacatggctcatcttagctatttgaaaatggcaaagatattcaaatttgtgaatgttaaattataatctccagagcctcwgtaaattccctgaaatacagtgttagaacttcacacgaatatgattcctgaaagttgtgtcagtcctcatgggtgtttagatccatgactgaccaaataattttaaagagccagcacgctaactaacaggaattatagaaatataatttaaattttattgtaattgtggcaggaaacttagagccatggacaggagccccgcaattcataacaattcacaatacagaaaaatttttctgtatgagttgtatgcgtcgatgattacaacaaattgtgttttatttattcacccattattgtatttatctattcaatttcaattatacaactatttactgagtcagcctaatatatgccaaatagcaggcaagttcacaacttaaaaatgatacacttcaaaaattcgattataactaaagtactactctaatttaatatatacctaccgtgacttctaatttttatacttgattttattcttattggtcttagagaaaatagccatagaaagcattaacactaaacggaaggctttaagaatgactgtatagttcgttgcaattagacataatataattaaattgaatcaatcgtatcagataaaatatacactttaaagtgaaaatgttaatgattcttagtataactgtaagtatactgttttgttcatttgcatgcttgttttccacacaaaatgcagcactgttgtggtttagagctaagtatgtattgccagcattcaaacctcagcaatgtcttttgttagctgtgtgaccatcagcaagttacttaacctctcttgactcaaatcaccccactgggaaatggatattataatagtactaaccttaaagaattgttgtgagaattaaatgatttaacacctataaggacattacatgactgcctgaggttcaataagaactatataaatattagctattattatatgcatgcacattatgtagttagtagggggcaaaatcctaggttatttcattttacatccatttctcactaactctttaactccaagaaaagttacttatctgtactttatttcatctacctcttgaagttgttcaaagtttgaatgaattaacacacatggagtggttagcacagtacttggccaatagtcaaccctcaaaaaatgttagccataattttttattccttatttcattatagatataaaatggaggtagtaattattatcttatcccttcacaggacaattgaaccactgaacatatctgtgaagataagtaaacagttgaatattattcaaaaatgtgtttactaattatctagtaatttataaattcagttattctgtttgtgaataatgagatgtgaataaaattaattaaaatatattttcttatctgtattattgcctgaccttggtggcaagcgccagagcatctgtttgttttttctctatttaggttgctaaagtatcttgtcatataattcagaaaattatatgatataaaaatatattatgtaagaaaataatataattcagaaatatatgtatagtattgaaattaagcagaagccctaaactgtttttataaatattctgaagtatgttacaatattaattatcattattggataggtcttttggttttaaaaatggaaacaatttttttaatggaaagattatatcctaaaacagtaattttcattgaatcttaccactaaatgtatatttgaaccatttcataatttctactggaatgtgtgaaaattttaaaaaactactatcatgaggatggaagcagtggtgcacgcctgtaatcccagcactttgagaggccaaggcaggcggatcacgaggtcaggagattgagaccatcctggctaacatagtgaaaccccatctctactaagaatacaagatcacgccactgcactccagcctgggggacagagtgagactccatctcaaaaaataaataaataaataaactaatatcatgaaatgaggacacaagaaatactttctaggatactagaaacattgattaacaacttgggaaatactgctctaagcatgctgcactgtaatttttgttctttttttttttcttgttaggaatctttccctgaaattaacaaaggacgttgatcaagaagccaggtgttcccacatcagccgaatgcccaacagtccatctgcggattggcctctacaaggtgtggaagaaaacggaggcatagattctctgccattcagactgatgttacaggactgcacggcagtcaagacgttattattaaagatgaagagagttcttcaagaggtaatggtttcctctaagattaatgtccttcagtgctggtagacaatgaagtctgcagacgtggttagaccctgctctgtcagtaattaactacatgacattgggcaggggtcaggtttcctcttggagcttagctattttcatatgtcaaatgagtgttttgaagttctggtttataaggtactctttagccttaaaattgtaagagtttacgaaatacttaaaaaagaataaattgatcccaagcatccccctatttgtcaggtaaggagaaatgagtatcagctatatagttatggttacatgctattataaagctattgagaaatctattaaatgtatttcacatcaatgatactgggtctttgtttatatgataccataaaagtagtttatttagtcatttttgttccaataatcagaattcagtaaaattgaattacagtaaaattcaatctgaaggtctgaatgattttgcctaaggaatgtagttgccctccccacagcttgggcctagttactgaaacagtgagctagtcaggaaaatgcataatgagattcttttacccttgtgcccagaaatcagccattctttaggactcaagtttgctttggtttgatttttataattacaacagttgttttatttgagggatttctatacaaagtatacccgtgattattattacttcatagacatgtgaagtgagagttaraaattttaaattatttttctcaagtaagtgtaatttcagggcaacagcctgaaatttgtgtctttgtattacatcctattatatttaagtagatttatctttattgattggagatattaataaagaattgagaaaaatattattatttagaattaatggtccctatgttataatgattgctaatatttgctttttgaacactttgataataatgctagcagctaccactggaggctagaattgaatcaggaagaaaaaaggcagtataaaagaaatgaatgccatagactattggggcttccagtaatgtgttctcatcagctgttataaactgtattagtctgttcttacactgctaataaagacatacctgaggctaggtaatttataaaggaaagagatttagttgactcacagttccatatggctggggaggcctgacaatcacagcagaaggcgatgaaggagcaaagtcacgtcttacacggcggcaggcaagagagcttgtgcagggaaactcttatttatgaaaccatcagatctcatgagacttattcactaccatgagaactgtatgtggggaactgcccccatgattcagttatctccacctgcctcccccacccttgacacatagggattattatgattaaagctgagatttgggtggggacacagccaaaccatatcataaacaaaagctggaagataccttctctgtgtcccatacaggttatatctctagggcagcctttgtttctggatattctggatcctataatgtgttgtgctgtagcggtatgcttatacttgattactcttagaatttcagaaattatatgagctggcagttcagcaaaggcatcaaaataaattatatgaacttaaatcaattactttcaaaaagggtaatcagtattcaaaatgtgttttctatttgttttactattatctacacttgtgagattatttacatcttttagaatcacatggtggaagtactatataattctgactgtacagatttccaacatgtagattcatttatgtcattttggtagcttgaaatcagccatgtgggagtatttatgcctcaraaattggcaaacactgcaaattagggcctcttatttttggcaagcctgttgttaaatattgactagcacattactatgtgtataactgtatgattctatactgacaacataaatatttgcctgcaaatgaatagataagtttgaatttcttccacctttggcttaacatgcaacctgatcctctttgaacaagacaaacttagtaacagctgttatattagaagatactagtctcaactattcagctttttacctctgtttggtctgaattttaataacaaatcagttaaagcaaaagataagtagaaagagctgacagaaggtgtcaagaggctttcttagagtacttaattttataattttaaaatattcagtgatattcactataaagtcaatattcagaatatatttagatggtttctatactgccacctggttttctttattaaggggtattcgaagaagctgaagagaattgattttttaaagctgatgtagagtgaacaatacttaatatatgtttgtgcagcccattcagtgagcagagggtctttattatcaacagggaaaagcaatagtattatatgattagcatagacaacagttctactaagaagatattcataatagaggcctytaaagaaaattgttttttgaaatgttccctaagccaggaagttttaaacttccattcccatttcattactaaattggagtttaatatcaatattcatttagattaacaatatattttaatataaaaaattcattcctattttgagctgatttttatgatgcacaatcgttcaatctttgttcacagattattattattattattattattattattattattattatttgagatggagtctcgctctgtcacccaggctggagtgcagtggcgcgatctcagctcactgcaagctccgcctcccgggttcacgccattctcctgcctcagcctcccgagtagctgggacaacaggcacctgccaccatgcccggctaattttatgtatttttagtagagacggggtttcactgcgttggccaggatggtcttgatctcatgacctcgtgatccgcccgcctaggcctcccaaagtgctgggactacaggcatgagccgccgcacctggccaagttcacagattattttttaatggcaggaggtacctatttgattttaaggtaaaataattacttaatttttacatgtcatattagaatatgcttttatttgagatttttggtttgttacatgagtattgcatttgtatattttttctcattgatctctttgaaacctatgacttagtggaaatgcaatgcattcatgatatttttacacttttgctaataaaggtacacctttcttgtgagcaaatcaagttatcctttgttgtttttgagggaacatcttctacaaatagcatttgaaaatatccagagatagtaatagtgagatcacagaaaatttttggcttaatctgtttaagattgctctagggttgtggttaatgactagcggctagaaggatgcctcgacagagtgttaatagatgactttcctaaagtttctagaactgtttcagggttgtggagtaataaaaataattccttggaaagttctacacagcaggctaamtaaatatacaggtcgagcatccctaatctgaaaatccaaaatccaaaatgctccaaaatttaaagctttttgagcactgacgtgacaccacaagtggaaaattccacatataagtactttaaaccacttgttttatacataaaattattaaaaatattgtataaaattacctttgggctatgtctataaagtatatatgaaacataaatgactttcatgtttagagttgggtcccgttcccaagacatctcataaggtatatgcaaatattctaaagtctgaaaaaattcaaaaaacacttctggtcccaagccttttagagaaggggtactcgacctgtactctatctttcaagtactcttatctatatagtccatattacttatggcattttaatgaatataagcattaacgctgagatctacttgtaatattttaaagctacctataaaatttacttctttctaaatttttttgtgaggtatcacatgtttaatattattttgcaatttttattactggctaaacaaccttagattgctattaaaatgttaaatcccattagctcattccagatttttttaaaagttattttgtcattaactgtaattgcattacttattattctacctactttgggtttaataaaaattttcatcaagtaattcatttggcacttagtaattcttccattttgtgccatcaccataacaacataaatcatattaatctaatccaggtttggggattatatatgttatgctattttataatatataatatatactttcaataaaatataattttgaaagtgaatacacctgcaaaagtgaatctaacattgtgtttgtatctgaatcatcttgggtaggaaccagagatggagatgagtaatgggtaggcattgctctaaatattctgcttcagtaaacctgtctttggcccaagcatgtgaatggtgaggactttctcagtgtctcttccaagtatactggaaaagcactgggttaggatattgtgttttagactgttggtattaaacatcctgaaaccttcctctacttaggagattcttgctcctgaatacttttcagatctgcttatatgcatctcttcttccaactgctcctacatcaatgatggtccattttactgaagttacttcacaactggtcttacttctagtcttcccacctatcaaatcaatttactcattgctgtcaggctaaaatgattatgtgatcaagtcagtccctgtatatctttaaatgtttcctaattgcccttacaagttcttctacaggttgtataacagtctatatttcctctatcattggagcacttatgtctcctcattwtaattgctaatcttccttttcccagtgatattctaagatgcaggaaaatgatcttgtgaacttgtaccttgttatatcttctcaacctggaaggtatttgctgcttaataagtgtttattaataaataaatgaaaggaaatggatttcattctgtttccaggctaccattaaaataactgttggcagaaaacaaatgataaacttgagtgcttgatggaatgaggatcaaagtaagtatgtagtaaatttctcctctttaaaagaagtgtacaatatgtttttttctcagaatatgaaataaagacacatcacaaaaattactagatttaatttaatcaagacccatttgtatgcccaagtctatcaatggtagatataatttcctgaagctttttcagatctttctatgcagtagatggctatggtrttccttaactgtatttttaaaattatstgctaaatcttccagattagaagaaaggcctagaggtttagagactggttatttccatatgtactcactcttttcacacagagaaaattttgttttcactgaacatcattgcaatttcagaggaaaaggataactataaatcattataaaaccacaaatcagttaatctaataaacataaaattattggtataaagccattattacttcttatttgtttggctgagcttaccgttttcctagtgatggtctgtcgacctcctagattttaattttgaggtgagctaagaattaataatctgaatggagtatcacactccaaattctgtcatccttttttaaagatcagtttctttttattaaaatgcacattcatattcccagcaacttcaaatttcaactcctttatttttagaaaaatgaccgatgttgggcctttagaaattctattgttgtcactttattctctagtattagtgggaaaagacatgactgtagtaagggaagagaactctatcatttttttcttctttttcttaaatttttaaaaaattttatgatctataaaagaaaatgtttaatatctacagaggtgggttttgttttaatgcttccttttagtttgctctattctctttatcaaacaaatatattttgatataataagctgtatctattctaacaaaatagccagataagtaaaaatcaaggaactacttatttgaaaatttatataatttacaggcccatatagttgatgcaaatattggggctgtgaaacatttgcaaaagacccgccattgattaaagagctggaatctatttttctttttcttttctctactacctaatagttcaaacattaatttcattttacctaaaaggaataataattkaagactttcaaggataatattcaatgcaaaatttttggttttttttcagcgtaatttgcaattacattataaaatttacagtgttttctacttcatcatttgtcactgtttggtgggaatttttaaagagtttatttttactgcatttcagtaattgattcaaagggcattaataaggattttataactaaatgacattttcctatcagcacatcttgagatggaaagaaaagtctatagggtaggaacttcagcaatggataattagagaaggaaatggccacagtggagagtcataaagtaaagaaatatccaaatcaagcaattaccatggaaatatagacagcagtctaataatcagaattctctttatacttatcatttgaaaataacaaaattacaagtttttgctaccttctttatgtttatttatttatttttgctggtccagaaatatgtttaaggaaaattagaaaaacaagtttcatgaaaacatcaaatggcagaaagttagagtgactatactagtatcagagtagatctaaatatatgacatttcaccacagtcagaaagccatacttcataatggtaaaagtcagttctttaggaagacacagcaatcaaacatgtggatggcttgtttcaccaatacacaatgcaaaaactgacagaactaagtgaagaaataaacaaattaacaatcacagttgaagaatttaaaacatttctttctgtaattgataaagcaactaaatgaaaaaatcagaaaatttctagaagacttgaacaatattatcaatatttttaacccaattgacatttatagaatactacaattaataaaataattatatattattttcaaatgcgagtggaacatcgtcaagacacactatatactgggtcacacaataartcccattaaatttaaaaggtagacatctatggggtacattttttgagaaaaatggaatgaaactaggaatcaaaaataataaaataactataaaagcatcaaatatttggaaattaaattacaaacttctatataacccacagacgaatttagaaagctgaaaggaaatttttaaatgtttccaatgagatgatgataataatatcacaaatcaaaattttctggatatagttaaaactataattacagggaaatttgtgactttaaatgtttatattcaaataaagagtgcgataattcgtaacctttaactttcttccttgaaatgttggttaatggatacaaaaaaacagttgaatagaaaaaagttctagtattaaatagtacaattgggaaattatagtttataataatttgttatatttcaaaatagctagaagatttgtaatgttcccaacmcaaagaaaagatacatgtttgaggtgatgtatatagcaattaccctgatttaatcactccacattgtatacacacattcagagatcacatgcacccaaaaatatgtgcaactatgaaatatcaataaaaaaggtagytaataaaagaagggcaaattaaatccaaacgaagcatgtagaaagacataataaagaacaaaactctataaaattaaaaacaaataataagcccaaattgattctttgaaaaagttcaaaaaaaggctgataaaaaaagattatagaaaaattaagaaacataaatactagtgccagcaatgaatctagggaggaataatcactacaaatcctgcagacatcaacatgataataagacatggttacaaagaacattatggcaaaaaattaacataaatgacaaaaacaatttttttgaaaaatacagctttccaaagtgacataagaaattgcaaatctgaatagcctaacttgtactaaattaatgtattttattatttaaaaaagaaatacatatgacagatattatgtaaaaattttcaggaaatagagacacattatgcttctcatcttgttttatgtggccaacatatgcctattaaaaaaaattggcaaaaatccttataggaaaaaggaaattacagaatttttttataaatatagatgcaaaagtcacttaaaaattagtaaatacgtgtagcaatatgtaaataatgacctatttgctttcattccagtttttttagcatccaaaaaccaagcaatacaatttactatattaaaatattaaaaagagaaaagcacaagactgtattaatagatgaaaaaagtacctttgaaaaattgaaaaccaatttatggctcaaataaaaatataaacctcagtttactggtagtacaagggaacttctatagctaatattcatacttgatggtaaaacactgaaacttctcctcctaatattatcagcaaggtaagaatatccactcaccacgtttgctgtacgtgtgctagaggtcctagctaggaatgaggcaagaaaaagtgtaacaggcataaatatttgaaagaaaaggtaaaactgcatgtatgagcagatatgtttgtttatacagataacctaagaaatctacaaaaaagttaataataaaatgacagaattagcagtaaatttaatagcattgaagaatataaagttgtcataaaattatatattgctgtgtagcaaatcagctgtaaaatctagtagactaaatcaatatttgttatttcaaagtttctatggttaggagtttgagagtagttacctatgggttatggctgaaggcgtctcattagtttgcactcaggatgtcaacaatggctgtagtcatgaattcttggctaaacttgaagatctactgcctagttcactcacttgctgtggcaggaggactcagttcttcactgctggtgctcaagaggcctcagttccttaccatgtagccttttcgctggtcaacatggcagttggcttccccctgactacacaatytgagagagagaagacaaaatgcacaatgtcttttgtaacctagtctcagaagtaatataccatcacttttgtcaaatttattggtcacaaagatcaaacttgatttagcatggaagaacaatatgtaaagtatgaataccaggaggtagggaacattgtggtccattttggaggctgtctaccagtcaatggtgtattcctctcatatgcaaagtacactcagcccctcccaaggccattcaaagtatcattcaattacagcatcaattcaaagtgcagaatctcaaaatctaaagtgtgtatagccgtagatgaggtttaaacacagcaactcaagtatagttttccattttaacctgtaaactaatacacatgttagtagttttttggttaggattcaaggcctactaaaaattcttgctctttgttctgccctctatgttctttgttctaacctctgggcaattctttcttataaaggtagcacatgttttgcagcagaatagtttcttcatccttatttgtagttgtagacattggtatccaaaggcccttttcattttactctttgtcccttaaagaccaaacttggaaagtgtttctgtgaatataactctcttaaattccttttggggttgcctgtgaaccttattcgggaatcacttccttagacaaaatacgtacccacaaatcgcttcaagataagccctactctaacttgaaataggtgcgggataactcctttaagcttttgaaattttaattgtttgactgtgaagttcgatgggccataccttaaaaccttaaacaaaaggcatcttctgtgtgagtgaactaggtactctgcagcaccacattttatcttttaggacagctctacattgattaaataaattttaagataataattttttttaatctcaaatcatgtggttgttgcacaggtttccatgtttatcaaaactcatcaaattacacattttggatggcaacacatgaaatatcattacacaactgttaagtgccagtgtcagtgctcccatttgtggagtttttagttttcccttgtgagacctgtaaaacaacaatgaccatttatcatacagactaacttagtattgtcagttcttataaattattacaagttattttccctcattgttagaataacataggttaaaaaaatttacaaggtaacatagtcttcatatacacatatggatcccattgtatactccctggagaaacctctggtttagataatgacatctcttagactgatagatttttagtaacagtattctgcctacataaataaggcctggttatgctgctgtacaacttggtcttgaaaatagatgaggagaggaggaaagtataattccatgactcttgctttgtaaacaaccctaattttcaacagtcctcttggagagattagagaaggtggagaaaaagtctttcctaaccccaaccccatttcactcacaaaattccactggaggaagtatattgcagtggtaaagattacagttgttttgaatcgtagagatctaggtgtgaatctcacttctgccattgtatagctactgtaagttgattaatgttttcttaagtttctgtttcatcatatgtaatattaataactacctcataggattatttggacaattaagcaataaaatgtgtacagaacatcacagtgtgagtttggggtaggcactcatgaacatgagccactgcagtgatcttacttgtgtgataattgccaactatgtcaagccacgtgtgaaatatttgagatttcttaaacacttaaaaatataacaattaaaaaagcatatatatattctttatatatatatacacatatatatcagtaaatgcttcttaatagcataatgtgttgtattcattgaatcaatatcaatcaatattgaatcaatatcaataaaattatcaataatttttaataaaattaaaataatttaccaataatttttaataaaagccatactatctaaaactaaaactagaaggattattgccatttatgcttttctggacatactcaattatggcagcacatttgacttgacaccactccacaaaagtactacaacatgtcaattgaatttcctgtttagagtcaacatatactgtggttgttccaggtgagaactcagggtgacagaccagaatgaaagaaattgagatagaagggaagagatgtgtagtgtttttttgaagtcttgtcaatagtacctgcttgtgaactggaatagagtggtgacagatagagaaaaatcaagcattactctgaaagttgtcacttgagtcacaggcagattatattgccattttatgagccttggaagactagaagaggagtaacctgtgcaagacagaaggaaacaagagttctattttgatcaggtgaaggttgaaattcttatttcaacatgcaaatgtatgtgtcaagcagaaatttgaattaatgtgtctgtacatccagcaagatcatggctagaaatgtagattgattattcatgatcatatagattctatttaaagttatggaagagagaatttgtatttaaaaccagattaggatgtgccaatatttaatgattggaaaatcaagagaaagagtgtccagggagctaggaagaacactaagagcatagtgtctttcaaaaagccaagagaaaatattgcttcaagaaggtcagcttggggaggtgctgaaaagtaagtaggataagaaaagataagcaatcgatttggcaatcctttgaagttaattccaaaagcatagtaataagctttaggaatttcaatatataaaacaacctattctaagtgttaacttggatagtcaaagcctagaatagaaataaccatttccatctagttctcagttgttaaattgtttgttaattcctttatggcattggtctatgaatgtgaaagacatgaaaattaataatagatgtcctgagttttaaaaatagcttttaaagtaagacatgtcttagttttggaaggaaactatagattttattaggttaatcaagaatgataaacaaaaattcattttatagagtattctccatgttgaggtatcatttttcttttaaaaagtattatttatattacttaatgttattacttaatactgcagaataaatctagcatagtgatcacaggatacagttatgatatgattaggctttacgtccccacccaaatctcatcttgaattgtaatctccattatccccataatccccagatgtcaagggagagaccatgtggaggtaattgaatcatggggatgatttctcccatgctgttcttgtgatagtgagtgagttctcaggagacgtgatagtttaataagggactttttcccctttcgctctgcacttctccttcctgccaccttgtgaagaaggtgccttgcttccctttcatcttccaccatgactgtaagtttcctgaggcctccccagccatgctgaaytatgagtcaaacatctttcttttttaaattacccagtcctgggcagttctttatwgcagtatgaaaacagactaatgcaaggtactagaacaaactgctcagatttgaatttcagctctcacaattactaggtgcatatgattttgggcagggtgcctaatctctccgtggaaatctggtctcttccaaaagtgtaatggtgcatgttcaaaactactagataattttaagttttccctggtgtttttattacattactctcccaatgaggtataatatattaatctaaaatatattttatgttaattgtattcttatgcccacaaaaaatattttgagtacaaaaatcaagtcacaggtaaatcctcatacagaatatggagttaaaaatatgcaaacttaaataatatgttgttaagtaatagatatgtatatagtaagaccataagaaaaaagatttaaagagtaagaagatgctaaacwccgtattcagggtaagattatctgttagaggtagtgggggaaggcatgtgcagttacgaaggggcacacagaggtctttctaggtattattatttacaatatattttcttacattttttcaaaataattatgtatacatgttttcttatgtatgtgaaatcttatattaaaaaactcactttccaagtgtatgtaatccgagtggttccctgtacagcaacattactccccacaaccctttttcttgtgtatccctatgcctgtaaaaatggcagaaatattttgcctactcctatgctgtcaatgtatcttctgatatttatatgatgtcaaaatgcaagtggagcaggatcaaggtgaacaaatgtatacccatatgccagagatttcttttctggtatgtgtacytatattatctgctagtcatgcataatatttgattgcttataagaaaacgaactgcaacccacagttttaacaataatgccaccttcattgtacctaactggtgtggtaatctatttgtgttattatcatattcaataattaatcaaataaccactaatgtggttttattatgcatgtctaactttcagttttcttcatgaatccagcattaatgtttcacttgtaaaacaactcacatacttttgtgtgattcgatgggctaaatccgacattaagaatttcaagctgcaacataacaggtatacagcagacggcaccctgcagaatctccaaggaatacttgagtcgtcagcgcttctgatgggttttggaaaaagacagtgagcagagaatcacttaagcaaagtggaaaagccgtaattgtgttcctctgagacacatttttactgaaattatgttttgtttttgtttgaaaatcagaatcaaaggcatatttaactacagttaaaatagctgtttttaatgagtgattctatcaaatatgatgttacaastttagataacataatgcaatttcttaaaagtagtatgaatctaataatattcacatgtttacagatgagcaaaagtgtttcagaatctagtgactcgtttagctggaatgcacttattccttaactgtatcattttaaccttgataaaattgaaaacttgtggaaattgatggactttattttagtttagatttaccagtagatagacatttactatttcaaatattgtcattttaaatatgttattttctggagaggcacagtggctcatgcctgtaatcccagcacttcagatagcctaggcaggaggattgcttgagctcaggagttcgagacaagcctgggcaacatagagatctcatctttactaaaaataaaattgttaggtggatgtagaggcacacacttgtagtctcagctacgcctgtagtcccagctactctggaggctgacatgggaggatggcttgagcccaggagtttgaggctgcaataaggtgtgattgtgccattgcaccccagcctgggcaacaaagcaagaccctgtctcaaaaataaahacatacatacatacatgcattattttctgctttttttttttaaagtaaaagtgctcaagatatatagaggactagctattgataaaatagaaatgagtcaatttatatttaagataaatacgtgtgaacataagtagacccatttgttttgttctctttgattaaatggacttttgagcagactatgaagagtggagtgtttaaaaaaaataatgatttctcatgaaatattcacttcacttctcttgaaaacatgaatattgttttgttatgcatgatctacattaggagtcagcaaactttttctgtcaaggctagttagtaaatattttaggtttttctgactgtatattttctgtatttcaactcctcaactaagttgttgtagtgtgaaagcagctacattaaatgaatgaatgtgtgttgctagttcccataacactttgtttaaggaaacaggcagctgtccagattcaggatttgtcctgggcctgtcatcctatactacttcagagagaggagattaaactgtcatgggaggcattgggtccgtgacattggagcattagttttaggagcaagaatatacagtctaaatcttattccattactagttaaatgttcttaggcaggttgtttaaattctttgcctcagtaggttggggataacattcacatatcacttaggtttgtagagaatattaaatgtgttaatatacttcaaatgcatggaacagtgttggacacatagcaaatgctcaatacgtattagatattattttatgattttcacaaagtctgagggccactagtgaaacaaagaaactggatttgccattagacaagcctgaattcaaatcttagatctacaaaaatttaagaatgtaatttaattcagttttgtttaatttctttagcagtcataggtttctttgggtgtaataaggggattaaaaaaatcatataagtgttgttgtaaaggttagatttcatttgtgtctggcaatggaaggatctaaataaatgttacttctctttcccccttaaaaagttttttttaattttagtattaattctaaatttgttgcccaggttggttttgattgctggcttgatagtacatttatgattatagttttctctagaactggtccttgattttagtatcctatttctttcatgtgccagagctgaagtttgggccttgagcctcacgtttgttgcagagattcttttgctagttcacaggatttctaaacacaggtttaatatcccttatccaaaacacttaggatcagaagtgtttcagatttcagagtttttggattttggaatatttgcgtatatgtaatgagatatcttgggaatgggacacaagtctaaacacaaaattcatttgtgtttcatatacatcctaagcacacaacctaacgataattttatacaatatttttaatagttttgttcatgaagtaaacttgtgttatgtgttcatgtgtggaatttttcacttgtggcaccatgttggcactcaaaaagttgtagattttagagaatttttgatttttggattagggttgctcaatctgtattttttttatttaatttaatttaattttacattccaggatatatgtgcagaacattcaggtttgttacatagataaacgtgtgccatggtggtttactgcatctatagacccatcacctaggtattaagctccacgtgcattggctatttatcctgatgctctccctccccaacccccaacaggccccagtgcgtgttgttcccctccctctgtccatgtgttctcattattcagctcccacttataagcgagaagacgtagtgtttgattttctgtgcctgcataagtttgctgaggataatggcttccagctccatctatgtcccttcaaaggacatgatcttggccaggtgcggtggctcacacctataatcccagcactttgggaggccgaggcaggcagatcacctgtggtcaggagttcaagaccagcctgaccaatatgatgaaaccccatctccaccgagagtacaaaaattagctggatgtcgtggcacacacctgtaatcccagatactcgggaggctaagacaagagaatcacttgaacccaggaggtggaggttgcagtgagccgagatcatgccgttgcactccagcctgggcaacaagagtaaaactccgtctaaaaaaaaaaaaaaagaaaaaaagacacgatctcattcttttgcggcatagtattccattcaacctgtacttcttatccacctttctaagtctctgatcaagttacattgtttcatagcaaattttggataggatatcagtgaattataagcatgtccaaatagatacctacgtttacytaggttttaaaatctttccaaaattttgttttgtttttaagaaatattcaaaaatgttcgatgaaacagagatgtgttgtaagtgcttttcttgcaaggaattctgtgttatagtaatgatattcgtagcttctatttgaagccaaacaattttaattcatctatatcttcttctaaacaatttcctttatatctatacttatagtcttcaaggtgacattttatctagatatrtagggatttactgtttacaacttaaaacattattttaattgcgtattctcagatggaacaatcctaatttgctgttgtttaaattgtattatttatttcctattcagggctttggaaaggctcacaatcatcatatttttgtttaacttaactcttggtttatggttttgacacatggtcataaaaacatgctttgataaggtgtgatctaatttagtacctactgaaattytatgtcccaatatgcccttactgctttttaaacctaaggctgttttgaaccaaaagccaattttctaatactggaaggctcatttgctccacattattgagaaacatatctattttatttaagtactttagaaatatccttgctagggctgtgtcaaatttaaataccaccggaaagataattgaaaacgctaaataatcttgaattgtttcttctgaatatttctctttacttrgttaacatccaagactatgtatcttactgacaaattgtttaatatctgtcaaagttatatttcttttttctagaaaccctcagaagaggaaacaatttttttttggtaatgaattgtggtaaaagagcagtaaatattgccatggatacatataattctctggaccacaggccaaaaaactgctggcgttgattttggggaaaaaaatcagcagataacatctaaatctctgtgcatatagcaaaaataggaattttgggggaaaaataatcatactatatagtaatttgtgtttggatttgagaatattataatagtagagaatgaaagtgataccaggatgcctgaagtgtgtgtatgtgtgtgtgcaggaacatacatgagtgcaagtacacaagtgcctatatgttcattgggtttgagtgtgtgtatttgtatacactggggtttaggaggtagagttggaagggatcttaaaaatagacctaaaaaacaaacaccttaaatgcatagatgacatctattgcttcctctctgtcaggttaaatttgrcctcattgaaatttctacccaaccttgcaaaaaaataccaggatgcataaaccaggaagtatgtctgcattcaaacattgcttctgagccatttcttggtatccttattgtcaggtctatcctgcttttcttcactatgttaactgaacttactatttctgtctacttttaggctctgactttgacctttcctgtgtgtgaatttaatttctccctcttagcagtaaagcaatgcatagattacttttaatgacccaccctttcctttcatttgcattagccctatgatattctatatcttcttactttcctagrgtagtagaagtcttggcttgttttgccagacagagcaaaagtgtcctgggatccacctaaatctcgtaaaatatttccttacacagaacgcaaaattgcttagtactctctacaaataccctcatccccccaccccaacacacatccttttcattttaaatgatagcccaggataaatggtgtgtttccatcagtgcttcagattgccatgttctttcagctcattatgcgcccacccaaattgaatttctgtccctagcatgataagcaagcatttaggtttaattgagaattctccttatcttattataatgagaatttttaacaccaccatttctgtaaccattatggtagtttaactgctgttttctgattatcaacttttgtgagacttttaccatgtgcagagtgagccagtttggccactgccacaagcgctgtggtattgttcctttataatttttgagagtaagacatggacagagtaaattgtgtttaaggaggggtttttgttgttgttggtgtttctcaggtagacacatatgagcacrttaaccgcttttacagggctttctagatttcaaaaagctattggtcaatttagcaaatgttagtattttcaaacttcttagaaatgttctttatactctgccatgaaaattaaaacataaaactagaaatttgaaagatcatagcttttctccccaaaagcatgctatgtatttgtaaggtaagtaaaatgagtgaaataggatgaatattcagtgattttaaaaattgtgaaaaataaaaactatttttgacaattaaaaaaatagtagtgtactctccactttatacaaaatatatactttaaaataacattgattgtagagtcgggtgtaggagaacaaaaagcaaattccaaaaatagtttattttacatttgtttaggataagtttaaatggacttaagtcatttgtcctaagagtttaggaagtgaagaaatttcaagatagtaagaaatccagatgaaaatgaaactaatcaatccataagtaataacaattggtatttggcttatacgttatgtgaaaaacagcaacaacaaaaaatattcatgcctgtgcttaacatctcagtggggagaaataggcagaggaaaacatgtttaaaataagataatttatacgatattttaattgtgcctccatttcttaagggaactttttttcattcactatctgcttgagctttatgtttaccttttaggttcaatattagagtattaggtgcaattattttataggctccttaccgtagttatagaattcagtttagacatagactcacagttttttgttcagtttatcaacaaattttcattgtatgtcagtctctgagtctacaaaaaggaaagacaaaatgagaggaataaaggaaaaaaagaagaaagaaagagagagagaaagaaaggaaagaaagaaagaaagaaagaaagaaagaaagaaagaaagaaagaaagaaagaaagagagttgccctcaagaaagaagtatacaagttcctggtattcaaaaaattaagtcatacttaaagcctgaaatttctgtggttgtagggcatactataagagagagtttctaagaaaaccagttgttatggaatgaattgtatgtccccaaaattaatatgttaaagccctaaccaccaatgtgactgtatttggagataaggcctttaactaaggttaaatgaggttataagagtagggccctaattcaatatgattgttgtctttataagaagacaaagaaacagtaaaagccaagtgaggacagagagagaatgcaccatctgcaagccaagaagagaagctgtaggagaaaccaaacttgctgacatcttgatcttggacttctagctccaggactttgaaaaaataaatttctgttcttttagccacccaatctgtggtattttgttatggcagccctagaaaagtaatataccagtcaatatcccaaatacagtagaaagaacaaagccaagattagattttatatggggaaccttaggactttgtgtgttgtactaatatagggaagacaaccaagagagtaacacggtcttataatattagtgacagagcagaagttagctgctgcttcttacacattcatctatgtgcatggcgataaggcttgacagctttgcactgataagaaaacaggggcaatgctccttgaatggtttcactattaaaatggccaagaggttaagtgaattttaagaaatttttcatacagaagcatgttgtgaaaataacaatcctgtccagaaattaatttgtgggttaatatgcaggacatattagaataaagtttattgggagaaatgaagatcaactttgattcaggtttgaaatagtaagaatatggagtgtggcagtggcaatgggaagctaagaagagagaggctgaagattatataaaaattggaaatgaagagattaattactattataaacagtatgcttgtgccctctcaatattcacatgttgaaagactaaccttcaatgtgactatgcttagagacagggcttgtgaggatgtaataaaggttaaatgaggtcacaatcgtggggccctgaatcagtagggtgggtgcacttagaggaagagacaccaaagttttctgtctctaccatgtgaggacacagtgagaaggcagctatttgcaagccaggaagagagccatcaccaagaactgaatctgccagccccttcatcttggatttcccagcctccaaaactgtgagaaatatattatctgttgtttaagccatcagtttatagtattttgttatagcagcccaaacatattaagacaaagtggttgggtactttgaaactaatattttaactaaagcactctgagctttagaaatcatatttatartaactataatacatttccaaagaaagtataatttagtgaaaataaagggtcaaggggctgggtgtggtggctcacacctgtaatcccaggcctttgggaggcagaggtgggtggatcacgaggtcgggagtttgagaccagcctggccaaaatggcgaaaccccatctctgctaaacaaaaattagcctgtaatcccagcactttgggaggccaagacgggcagatcatgaggtcaggagtttaagaccagcttggccaacatagtgaaaccccgtgtctactaaaaacacaaaaaaattagccgggcatggtggcaggcacctgtaatcccagctactcgggaggctgaggcaggagagttgcttgaacctgggagggagaggttgcagtgagccgaggttgcaccactgcactccagcctgggcgactgagcaagactccgtctcaaaaacaaacaaacaaacaaacaaacagaaagaaaagaaagggtcaagaaagtgaaaacgaggaagaatctttttgagcaaaaaggaagaaggttgccatgttttctgtaaaataagaataatraaaaaaaagaragcttgtgggattcaattgcaaaggaagttcttaattaaggaaaggaacatgttaagatagtaacaggatagtttggacaccagacttgtaaagactttggataaaacttatgatgaaaaaaggaatgtgatgaatagaaacaagtcattctgaaacaacctgcttgtgcaataaaagaaagggagataatcagtgaatgaaagggaataccatatcaggtccaacctcttcaacagctaatatctactctttaatatgttaccccactttacastcagcatgcttataaatagtgcttcttggtatcaattttgcctttccctaaatacctacatattttttacaccatcattttactgaataccaataattaaaacccaggctctactttaacacagttttatgctaagccaatgtgtcactaagtccttttctttctgtaaaatcttttcttcctacctcaacttttcttctccatttctataaccaatgctctagtctaaaattgctttaaatatgtgaaatcttgtaatagtctcataactaagaagcagtattgcaaaatgtttaagaacataaactatgaagtcgaactaacttgggatagaatcttgtctctgacgtttgcatactaagtgcctttggggaagttatttaatgtcttcaattctgtttcttcatttgtagaataaagacttgaataatagtagatgagaaaggctaattactacagatagagagaaagagaaattttctcctttctcttcattaatccactcatatctatttcatcatgttattttctcaaaaaattttagcagatttctatttcatggaaaataaagccaaattcattctttattctactataaagatacatgcacacgtatgtttattgtggcactattcacaatagcaaagacttggaaccagcccaaatgtccatcagtgatagactagataaagaaaatgtggcacatatacactatggaatactatgcagccataaaaaagggtaagttcatgtcctttgccagggatatggatgaagctggaaaccatcattctcagcaaactaacacaggaacagaaaaccaaacaccacacgttctcactcataagtaggagttgaacaatgagaacacatggacacagggatgggaacatcacacaccggggtctgtcaggtggtgggggataggggagggatagcattaggagaaatasctaatgtaggtgacaggtcgatgggtgcaacaaaccaccatggcacgtgtatacctacgtaacaaaactgcacgttctcygcatgcatcccagaacttaaagtataattaaaaaaaaaaaagtttgtaaagcaaataacttggaagacagagatagcgttccccctctaggacagagagcaaatttgaaagctaatgtctccttccaagacaagttttggcaggtttgctagcaacacatttaaaagattgttgttcctaagcttgagattatttagctgtggcacaaacacaatgtgtgtatcccttccacctggattgcttcatatagtgtccattaaacttgggggatgagaaatagcatggacaactggagtcaatggaaaaattaagttcatgctacctgctatatcctgaataataaatttcctgtatatttaacccagaaagtctcaagtgttctgctagcatttakgaaactggggcatactaattgatttatatttattgagtaaaatatcagacccctcacagttattttcaaatttaatatgcaaaattttttcctgtagcaatttaatttataagtaaattttaaaattgtaggtgtataaacaaatttacttcctaaatatttaaatgtaataaaaacacttagraatataatttttgtatttcaggatgattaaacatgcagtaaaataatgaagtcacatgttgctactggaatcaaaagttcctagtttttgtgatgtcttttataataatgttgtatatgattgtagaaataatactaaaatactacattatcagattttcarcacttttcttctgaaaataatgggctgttacttttgagtcagagaatcagtggtctgtttgcatgtgttggagctgagaaactgatatcccaaaatatggcattttgacatgctgaactgaagaagccttagggtgtctctgactatctttcccaaaggaaaagatctagacccaataaggagaacaatattctttttcttctcttccctgttatcttattatctattgcraaaaagaagaccaagatgagatcatacctcagtggacctttttatgagtataataacttacaagcataatgacaaggaccatttaaattccaaagaaaactatttacaagttaatctctattccccattcaatcatttttgctagcaattatttattgcccttcaacagaattcctcttcccctttttcccataacctgtcttactagaagaatccaaggccccattgtttctctgtatcctcaaaattaagtttctgtaactcattgggaaggtttggtcttcattctgaaggcttccgtgtatgcatgttaaataaatttgtctgctgttcctcctattaattaatatgcctcatgcctgtgatttttcagaaaacttttagggggccaagcctatggctcccacaaatgcatttcaagtcgtttaactgccatcwttcttaccagacaacctacttgtctttataaaatagatttatttggtaataagagttcctatttaaaaaaaaaacttgctttgaatttccagctgtcagagctgtgtaattttatgtgtgcttgtttttatttgagagattatatcctcttaaaagraaaacaagtaacagagtaatgaagataaaataatctcatttttataaaaagtgtattttatatgtttgcatatttgtatatgagaaacactgcgcagtggtatcatgtgttacctaagaaagaatagaggagtagagggaaatagttgrctttccttcatatatctgtgccaatgttattttttcttttggttttgtgctagaaatacaaattgaaaaaaaaattttaatgaaacgtaagtattgaagaaccaatgagataaattaattaaaattatgatagacaccatgatagagtcagtatttatattaataatattttaatacaacagggtgtacattcgtaagtgtgaataacattttgaaatatcttattttttaacataatttttatatttccagtaaattcagccaccaccrtacctatttcctattttatataacttgaggcaccttgatgcttcatttttcacaaattgtttccttattgagtgatatgcttttatatttatttaaaactatgcacgtctacaaaaacrcattagttaatttaaatcttgaaaggttgtaggatcatgtatttgtccattttcacactgctataaagaactacctgagactgggtaatttatgaagaraagatatttaattgactcagttccacagacttaacaggaagcatgactgggaggcctcaggaaacttacaatcatggtagaaggcaaagaggaagcaagaaccttctttacatggtggcaggagagagagagcaaagtgggaagtgctacatacttttaaaccatcagatctcatgagaattcactcattatcacaggaacagcaagggggaaatttgcccccatgatccagtcacctcccaccacgcccctccttcaattcaacatgagatttgggtggggacataaatccagaccatatcagatcccttatgttttgtttctgttatagtataaaattgaaatccgattatgtgaattcgttgggatgctttatttaacaayacttaattatttttcaagggctaatattaagattttgttatccaatggaataacatatactttataatttttcatcagctgtattacaaaaaaaggaatccttattactttaatttacttgacacttgaatttgtattttcttcyttttatactttatatttcattttacatactaaattctaattcttatagttttaattttttcttatatatgcaacatatttttgaataaatgttaaacatacattttaaattaacccattttccattctaaatgtacattgctcatttctctcttctgttacatagcattgcrattttttaaaaatctgctcatatcttytctttcatagaagctagcttccatgacaaagttttcccattcatttattcattcattcaaaaccacttatttagccctttattgtacgcctaaccctctctcagtttcttgggctatattatttatatctctgtaagtgaaagaataacacacaacttaaacttctttggaggcctattgccccacagtagtrtaagtataagaatgagtgtgatgtttttgccagaaaagaagtatagaagagatgctggctatataataaatttttattttataggtggggttagaaaggaggaaaagaaataagattgaggttgattattgtcatcagaaattttaatttcagtaaagaaaacagtgcagttatttataatgaaatattatcaaaatattattttgcatatttaaatttagattattctagcaattgtttatattttgaaatgacttacatttcatgcatactgttctgtacctatagatggcattaatatcactatattaaaaaagtatacttgatatttggcctggtggtttttgacagtgtaattataggaattttagttatttgtttctcatgtcaaatctagcagattcaataaaaaatacaatgattctctgtttatctgagttatatataatcataataaagttttataataggayccctcatatcagctgctctctttaaattatcctcctggtttgatgaagtaaaagatagatttttattaaaaaatttctgtagcacattttgtggtgtgttttgtgagatgacagtaacagtctagtgttttcatggcttttgatagttatttattgcatggtaaaagagaactttgggaagttttaaattatcttttctttcagattgaaacaaaacactattttctaacctgttatctctcatttccacctatgaaggcaacactttctggctctcttactcactggctcttgctctctttctctctcttacatttggagtcaaaactctgagaatgagtaagatctttttgatacagatctggtctgacctagatctttccttatagttttcaatttattgttttcacatgtcctagtttgggtagtattgagaggatccctaaaattttgatggatgcaaaaatatagctttagtaaacatgtatgtgtgcatttactcagaatttaaatgaaaatggagaatagaaaggattaaatactcgggtccaaatagagatattgttaatcttatattatctgacaamcttaaacaatttttaaaatagtatgccctaaattcatgaaaatcaaaggtataggagagtaaaaatcctcagaatacgtrtggcaagatattctaagaggctttgcacagttataatattcttggctttttcttttactaacatgctgcttctccaagtagagaataatttaatttctttcattctcttctacccttacattgttttgatcacctcttcacttcatctttcagagaaagaaaaagatattcatttgtttgacaggytgacattaaaaatctctttttaaaagtttttaaaaattgttgttaacaattaatatttttgaaacccattggacagtctaaatgctctcaataaaagatctttatttccatgttttctcctttgtgtcctgcaagtttctgaggaaggtgtgttaaaaccttcgaatatgactatgaatttttctatttatctattatgactatgaatttttctatttatctcttttattctgtcaattttttaatatatcttgaaaatatattattggatgtattagcccttttataattatgattttttatttttaataaatattctggtgttaatcctacatagtctaatattagtattgcttgtgctagtttctgttggttagtatttgtrcgatatctattttccattcttttatttttgtttttctgcatttgctcatttttatatgtctctagtgacagcatatagttggcttttatggtaaaattcagatttaaaaatcctttttatcttttaattggagtctggatcatatttgtatttaatgtaactactgatatatttgaatttaaatgtatgtttttaattttgttttctatttgtccctcttgttctatgttcctttttgtatctccttgaaataattattttctaattattctatttcctcttattactttgttagttatgcaatttaaataaactattcttttagtggttatgatagagatatcaatgtatatctttgacctggagaaagcctaatttaaatgaacacatgtaattttctgtgtaatgttaggacattaaaatactttatttatctctcatttacatcttcagttatgtatttaattcaacagatatgtgatcatatgcatcatgacctcaatatttattaagatttacctaaatatatgccattttatttgaactttatacatttctacatacagtcatctatctgggattattgtcttaatttctgaagaacttccttaatatttattttagtatgggtgtgctgatgatgaattccctctctctctgtctccctttcattcttttttccttaaaaagccacctatatcagtttcatcttaaaacatattttaactaaataaaaaaatctgtttgcagttatttttattttcaatgctttcattttctggctttattcaaaagagattttgttttttggaagctgatgtgtcttttctctggcgtcttttaaccttttcctttggctttttgtagtttgagctacctttacatagaattttatttgtttgctgtttatgttatttacatctgtggctagtttttaaacaatctgatccagtatcttttcaaatgttgcttctgcatagttcttctgttttttacttctgggactccaattgcatatattttgatgttacaccgtataccgtgtcattaagctttttcctgtatttttgttgttttttgtttccatgtttcaatcaragaattttatctgaccttcattatgcttcactaattttctcttcatctgtattaaatgcactgttaaagccatctaataagatttaaatttcaattatcatatgttttagtccatttgattttacatcacagttttcaattctctgctgaaatttttcatcttgtcatgtaatttcttgaacacattaattacaattatgttaagactatgttataactctatatgtggagccagtcacagtggctcacacctgtaatcccagcactttgggaggcccaggagggtggattgcttgaggccagaagttcaagaccaaccttgccaacatggcaaaccccatctctactaaaattacaaaagttagctgggcatggyggtgcatacttgtaatctcagctatgtcaggagactgaggcatgagaattgcttgaacccaggaggcggaggttgcaatgagctgaggtcataccacggcactccagcttgggtgacagagtgagactctgtctcgaaaataaaaacaacaaacaacaaaaaaactctctatgtagatctcctttggttctgtttatattttctggctttttcctttttatttaygtatttatttgattccatctccttgtacacctgataatgtttaattaaataataggagtaatttgaggctctaacattattaactttctgcagaaaggatttacttttgcaggcaattaagttctaaacattacatcttaatccaatcaggaattaaagtgattccaagatggacgtcagtcattgggaacctagtgggattaccaatggaaagaaaaccaggagtttccccaggaactcctctccctgggagacctgaattccaatgtcttcttctcaactcagttacactagtgacggccctgcttaagacctgtcattctcaaccactgctttctgctcaacttctcagattttgctgtcaatttgacaaatgaccccaaggataaaagtgacaccaaatgttacatttgcctttgtgggtttccccctgaaatcatgacgttttaggtctttgacttttcagagtaaaccatacttatgcatgtaattctctattactcccctctaggaataacttaaaaagatatagtaactcagattacagctgtgcgtgtaaagaatcaataaacatttaaatatattcacaatggatgttttctttatgaagaatrtaatttagtatgggaccattgaatttgcttttccaaagcatttcacaaactaaatatcttagaatatgtggtgacatctgtagttatatagtttaagtaacttgaaaccaaatagccatattaaagagatctcagtgtatgtactgtatacacacacatgtgatattttcttcccgttttcttgcctctctaggtagttttagaaataacaaaaagtggtgtgtgcagttcatccttgtaaatttgattttcacaacaaccaatgatatgagagggcttttttttttttttttgagaactgcccttaataatgaagatctactcctaaattaatgttacaatgggactcgttgamtcacatcagttttctaaattgattccaaggtaaaaatttctgggagatcattctcttgattctgctaccctctgaagaaagcaacaaataattaggcaattaacaagttgctttcatgcttgccctagtgttttgttaagagctccagttctggataggctctttgaatatgaattatacttctagcacctagcagtttggtaacccagaaaaagtgacttttccctcttagtggataagaattgtacttcataaatttagaggatttaatgagaaataaatgtaaagagcagattagtcatccccccaaaattgtattattattttttcatcatcatgatcatcattacaaccrccaccaacaycaccactgctaccatacttccaaaccatgtattgtgggctccaaaagttattattataacatttttatcattgtgactatgagtctgatttcaatagctagctatatttttaaccaacattgcataatgaatattacctagatagccttcttttcttagtaattgcatttccattatcactctatatagcatttaaacttttaaaaagctgcctgtgtttttataagttaaatatataatattaactatttagttgtgctatcctgaagagttaaaaagtatttgctwggkattctgactggtgtaagatatcccattgtggctttaatttacatttatctcatgaatgatgaacattttttcatatgctagattgccacatgtatgttttcttttgaaaaatgcttatttgtgtcatttgcacactttttagtgaggttttttgttgttgttgagttctttgagttccttagtcttcaaaagtaaaaaaaaaaaaccttaaatagatgttaatgaagattcagaaaaaggggaacacttatacactgttggtggaaatgttcagttagtacaatctctataggaaacagtatggcaatttctcaaagaaataagtatataactaccatttgatctaaccatttcacactgggtatctacccaaaggaaaagaaatcattatatcaaaaagatacctgcactcacatctttatcacagcactattcactatagtaaagatatgaaatcaacctaagtgtccatcgtcgatggacaaatgtgtaaagaaaatgatatctatgcatcatggaatactacatagccataaaaagaaggaaatcatgtattttgcagcaacatggatggaactagaagccattatccttaatgaaacaacttagtaacagaaagtcaaatactgcatcttaaaatttttgggaatattaatgaaaatgtgtcataacatttcaaattgatatatgatattcttcaagttatgtcttatctaatatttatatagccatataattcataaaagctgtgtaagccataaaatcatatatgccaattttgttggttctgttaaacaggaaaataagggcaacattattaygttttgatttaaatttgcaggatttwtgataagaaaaattattgtttgttattgctaacctttttctaaaatagayattaaatacattttaaaatagagtcacaaagctttgaaccaaagtagaaatggtggaggaaccttgtactttacagatgggctgccagctaattgcaccttttgcgtaatggctatatatttgatggatttcgcaatcttagaatgcttccaatttttatttgcaaagtagcatattaataattgccttgcaattttgagatgaagagtaaataatataaatttttataagacacttggcacadagtgctcaataaaggtaaaaggtgttattgttgctatagtttcctggaataaataactgctgtacagtgtttctcatggtgcttgcaataaaggaagcaacattcgcttggttgtctggattctgaaatactgcatctctgaaattcattcatattatgcaaatagtgtgataaacatttttattcctctattcctgcctttctcaaactccaaattataacttacctacagaatcccctgtattgaggttggtttttaactgtgcytttaakttattctgtagtttttaaaactgctttagtatttacaatagttggcagtcatgaaggtagtaaattatgacctttattcgttatcataagaaccccagtttgaacagagattgcacatgactttattgtccttctgtgcttcaggagtgtgcagttgcttttctgaaactccaagggagaatttgtgagtgtatttatatatatgctactagaaaagtaattgaagaatagaatagaagaagcaatgtaaaggcttcttagaaaacattaaactagtagagattattcagcctgaagaatagaaggctgaagygcaatatgcagcgaaatgtttaactatagtgtgagatgatttatgttaactataaaggagaacctccctgggctgaatgatagttattagaccatggtacagattagagaaagagtttatggaataactccaaaatttcctaaaatatcagagtgtcctacttaaatcgtatgctattggtcttactgaaaactataaaaatgcagagattttatayactgtttttgttctttaaaaaaacccagtgtttagtaacatgaaattaaagaaataatggaacacaattccacaagtatcagaaaatgtgctaccttgttgagtaaattgaaaaargcaggcattacttccattctgcttaagaaaaaaaaaaratttattttaggtctgctgtgtgatagttgacaagcagtaaggactggcttgtttgtcctataccactctttgtttctttstttcttttttttttttttttgagacttagtctcactctttcacccaggctggagtgcagcagcacagtcttggctcattgcaacctccgcctcccaggttcacgtgattctcctgcctcagcctcccaagtagctgggactacaggcgctcgccaccatgcccagctaattttttgtatttttagtacaaatgggtttcaccgtgttagccagggtggtctccatctcctgacctcgtgatccgcccacctggggctcccaaagtgctgggattacaggcctgagccaccatgcctggccgtcctatactactcttttatgggaaaaagtagctcaactgggtgtgaaaacattaatgttctgatatagggtctgctacttatactatattatatggaataatatactatattatatggaataagtcattttaattttctgcatctttttttactcactatgctaattgatctctaaaattttcaaattataatgttctgtgagtaaataaaataatgaaragtaaatgttttttagtctcatatactaaggcacatttaatgcacctcccagtctttaacatgcattctgattggattatttattcatttggggaaatcttatacattgtacaatatcttaactaaatttgatttgcattttcatgtagctaggatatgtaatttaggaaacaatataaattataaataattaaaacctatttttgataaagagggtgttaatgtaagctagtgatcctagtaagttttttcattacgctcttgtcttttgtttctggtactctacaaatttcaagtcatacattaaagtgggatctctgtatctgattcaggtcctgctatgtcataatccaatgatgtctcttaaatcatattttctttccttggcagttttattattatcactgcttagaaatactgaggcaacaaaatcatatttctaatatcttaaaggatggaatattatttcataaagtgagattacctaattgcttgttatgtttttgttctctataatgagagaggaaattaagataatcaccttgagttgattttctgatttttatcaggaagataaaataacttccctgtgctttttcatatgcaatattttgatagtaaaatartggtttactgtttgaaacctagaggaaagagaaaagaaaataataataaattgtgttaatccacacttggaaattttctataccttgtaaacatttatttcttacaattttctattaaagtagatattaacatcttcacttttttgatgaaaaaactgagattcaatcaggtttattagtttgtctaagaacccagtcaacaagtgaaacctggatgcctgctcagttccaaagctcggagtgtttctagtacaccagatattctggctacacacaagaaacaaatgggaaccttaaaaataccaatgaattcaatgttcaagatcaattgagaaccactaaagtatatcgtttatgttcttgagacaaggtcttgcttgctttgtcacccagctagaatgcagtggcacaatcatagctcactgcaagcttaaaccctgggttcaagcaatactgtgggcctcccaaagtgctgggattacaggtgcgactaccacacccagcctatactttattattcttcacaattttttcaaatatttattttacaatattttagtgaaaaataagtcaaatctaaaacatatgtttgccagttatgttatttcccattgcaatattgtagatgaacagatggttagctattagttccatctgtatgaccaaaatagagagtaattgtgtgttattgttacttataggttcacttgtcaaggatgagtgtttccaattctacaaataaaaattgtattattttctagttgtatgaaagtgaagctaatgcttaagaatgtaagttacctgtttgctactaccatttaaaagataaaaattggtttttcagtttggagatacttttaaaaaaatctctatttagttaataagaaattctatacaaaaaaaatctctacttagtttacaagatattttatacaaataactgttttggcacattcatgtatgagaccggcttttaagagtcaaaggattaatttgaaatattgatggtatgagtatgatagaaatttcataatagaaatattacaaaatggataaaatgttttctatgtgcttcgttatttactaatacattgacttctcatttcattacacatttccagctagatggcaagcaattcaaaatgggacttaatgtaatgatataattttgtgatttgtgtgtctcctttaaactttcaatcatagattaaattttaatttgttaatgtgttctcacaggataaacaaggcacaaattcctactatatactaacggaaaagggagttttttttgtcaaaagcattaaagcaatttgttaatagaattcatcagcattgtatttttctaccttaacatactaccttgtggttcacattaatagttataataattataaaataatttcataaatttagatacttgggtaattgacaaatatctatttacaaagctggtttagaaatagaaactaattggccaggcacggtagctcacgcctgtaatcccagcactttgtgaggccaaggcgggtggatcacctgaggtcaggagttccagaccagcctgaccaacatggagaaaccccatctctactaaaaacacaaaattagcctggaatggtggcacatgcctgtaatcccagtgactcgggaggctgaggcaggagaattgcttgaagccaggaggcagagattgtggtgagccgagatcacaccattgcactccagcctgggcaataagaatgaaactctgtctcaaataattaagaaaataaataaatgaaaccaaaataaatttttggcgtaaagtagacgcttttattgaattttagttctgtggaaaagtagatgtttgcgaagattactatattaaacatttaatcctgaaaaattcaagtccttgtttagtgaacttatttttccattacttttggctttctattacattattatccagtacaattttagtgagtatctagtaagtttaaggattatattaggtggtaggatatagtatatctatagtaggggtccttgctataacagaagagcagggaagaaaaacattaaacaaatacttataagtgttgtatgtcatgtattttctgcgctttgtgacatatggctgtaatttcgaggtagggagaggttctaaggactgaaacatatgctgagatttttttttcttttttttttttgagacggagtcttgctgtcgcccaggctggagtgcagtggcgtgatctcggctcactgcaggctccgcccccagagttcacgccattctcctgcctcagcctcctgagtagctgggactacaggcacccgccacctcgcccggctaattttttgtatttttagtagagatgaggtttcactgtgttagccaggatggtctcgatctcctgacctcgtgatccacccscctcggcctcccaaagtgctgggattacaggtataagccagcgcctccggccatatgctgagatttgaggggtraaggaagtatatttccagctgagggaaatgctaatctgaaggcactgaggcaagagtttacaaagcagtggggtattagtttgttattgctgctgtaacaaattaccacaaacccagaaactgaaaataacacaaacttattatctcacagttaaatagatctgaagtttagatgtgggaggtttctctggtgcaaatctcaaagggcagtcttcaaggtgttggcagtttgggctcttatgtggaccttctgacagtgggaggtgtgggaaaagggactctgtttccatgctcattcaggttgttggcataattcatttccttgttgctgttggctgacttccccatttccttacaggcctggagcctctgtcatattcttaaggtcttctgcattccttgtcacatgcccccctcaatcttcaaaccggcagttgtgcatggagtctttttcacctatcatatctgcctgacatcccccctctgccacatcacttctgactctccttttcatacgttagatgcaaaaaaaactttgctcttcaaagtttatatgattatattaagtctacacaggggattctggataatctattttaaagttaactgattagtaatttgaattactaatttaaatcttgattactaagtcctttttgccatgttatgttacatagtcacaggcttgacaccatgggcataaattatggggctaaaattctgcctaccrtggtggttgaattttactgcacatgaagaggtcagtgaactgagtggctaacttgctttttagcctgtatattttggcattaatcagccaaaaatggttgtggtgaagagataaactaaagtcaatgacatatctctagcaatacctaaaggttggcaattagtagacacaggatgagtagaggatgataccagcatgagcctcacagattgggggaatactgcaggctatggagtggtgataattaggaaaatgcaccagattgccctatcacgtgctgaagaaaaagctatcttcaactgacagaactcagtggaatcctggcactttggagagagccaattttcaccaagtcaaaaattgaactgagtagtcattcaaagagttcatactgttgagaagtttgttaaaaattttccaagagtaaagtagaaaattttgtgggggagaggaggaatcagggaaatgtatcaggagaaacaacacaaagaacattatgggcatgggagcgtcagacagagatggcagagagtggtgaaaggcaaagtgaattgagtatggatttacaaagaaaataataactctaataatctcttggaaatggatatatttctttcactagttatcaagaggtctgcaaagaaagtcaagttgttgaaaactgcatggtctttggaagagagtggtagagttaacaccgaatcgacttcaggttctgtgaagtctggagcatgtaaggtccaagtcagccatttgtttctgagagtcagtacaccatagtggttaggaatacagcctgtggcacaagggctcatgggttccaatcctgtccttctgactttgaacaattcatttaaactttctgtgcttcagattcctcagctgcacagtggaaataatgacattagtggccatttcattgtgtcattgtgaagattaaatgagtacatggctcattgttaagtgttagctactattattattattatactttaagttctgggatacatktgcagaacattcaggtttgttacctaggtatacctgtgccatggcggtttgctgcacccatcaacccatcatatacattagacatttcttctaatgctatccctccccagccccccactccctgacaggccccggtgggtgatgttcccctccctgtgtccatgtgttctcattgttcaactcccacttacgagtgagagcatgaagtgtttggttttctgttcctgtgttagtttgctgagaatgatggtttccagcttcatccatgtccctgcaaagaacatgaacccatactctttcatggttgcatagtatcccatggtgtatatgtgccaygttttctttatccagtctatcattgatgggcatttaggttggttccaagtctttggtgttgtgaattattaataatattgtgttagctattattattaatggtcattgctatgattttttacctacttaccaaagatttcaatattacactctatgcaasacaaataaacagtttttagactgaaaatctatgctaaacttaataattttgtgtatgtcatttggttcaataatgctacttaagaaacacagtattaacctcatagagttaggtattattgcttgtgtgtgatggtggagctgtgtcaaaatagttgttgggaaaataggttatggtttaagtgattttggtagatctaaagatgccaatcctggtaatgtaaacttgcctgttggattactttttctttaataaaaacagccataatcttctagaagcagtgttcttgagaaatgtatctgtcgctaaaaacagaggaggtcaaatgatttttctaggtatagtagtcacagtaaatatctactgtcacatgtagggaagcagcagaaatatactgtsgcttctgttattggaaaactgtctgtatcttttctagctgtctcctccaagcatccttcaatggggaattaaccttgtacaattaaatttgcagcagagtaaaaactttttaagaaaaagagccatcttttaaaatattagcctgttgccatttagttcaaattaygcgattgataattcaaaaccacttacatgctcatttttatgctatgtgaattgaatgtcataaaattcatttattatgaacaaaatattcaaaatgcatcagagtattatatgctgagctttgataagagaaaaaagaatgatttgacaaggatatgaaaaatcatataccaggtatatgaggttaaatgtattttcaaatgcttcttgattacaatagttaaatattccttgagagattttactatatgaatttatttcagatttcaagtagtcatttggaaattgttattttgggaattttttagatcaactttttctaatcacaactagaaaattaatactatcactttggcataatttgattgggactgctggttatttaaaacaattgatgtgtataagaaacttttaaaattattttaggaaatgtaaaaaagtatttgatttagtttctgcctccaggtactaatacagtaaggggatgaatcatgtacacatataattattgcacaaggtataatataataagggccataagagaaatgcaaagcaaatgaagtccaagaagagagagattaccagaagcttggcaatcaaaactctgttttcatatttcagatagacaatggaaatattaagtggaaaagtagggtatggaatatataatatagtgaactccaataatgaatattttagaaacacacagatacaaatagaaaatattggaaggaaatgactaaaggtataatgagtggtcatctccttctttctcttctgcttcttttgaatttctcaaattttctacaataattgcatttttctcttaaaataaaaacttattaaaatatatggtctcatattaatctaaaatctagagctatgagacaagagaagaaaatgaggaaatttctaagaatatgttcaagtgtaaattttaaaacctgtttataggaaagaagacaaacaccatagtaggtctataaggatggttggactgctttaatactctatagaatccctcctgtagtttatagagagtctctgtaaagaaagttatctatttgctattttaaagtaaacattatttagagaatatataccacattatgcttgataagtttggttatgttataacttggtagaggaaggtatcgtttaggggagggaataaaagcaactaacaattgagtcgaacttttgataagttttaggagtcgttgactaaaggttggtgtgaatgaatcatgtcaccttcatttgagttctctcttcaacctttttagtagaagaaaaaaatgtgaaggagaggaaatatgcttgtagrtataagttatattaagtattaatactcatgcacttacatgcttttaatataagttcaatgagaaaaaagagctctaaaatatttgtcaaactttttttaaatgaggatctttgcttattgttgcagattaataatatggcttttttgaaggatatttgccaaaatgtctaaaatgcttttagattggattatcttagagcatgtaaacaaatacagtgatacagtaatagggctatgagaaaaatcattcatgaatgaacctattccacaattatgatctctagcttgcacatgataacattttcatgtcatgtcttaatttaagaagattctcattgtttatgcaaaagcagctagtagagttcttttaatgagatggaatctattaaagtctcgaattgaatactaaagatgccaagtttaagaaaatgttcacattattgcttactgttctttgtgaattttctcactcatacgttgtatctcaggttgggatccctagaagcagacgttgagacaggatttcagttgcccatatttattgayggtattttctcaagataaagggagtgagggaagtgagaaagttcagsggaattcactaaagcaagaaggtggttttcactgcagtctagattcagccatatctcatggggataagaaggagcatgacttttaccatataattgtccccaccttgaggcaaaggggctggcattttgtacctccatgtattctttatcgatgttggaaaagcaggttagcaatctgttaggggaaagaacttctggtaggcaaagggaaattctccaaagaagggggcaactatgaactatcagcagccaacactcacagcagctggatcaaataaagagagtgtggccagaacacttaaactgttcagtagatattattggttaatcaagaccatagacatatttaatttaatttcacaatgttcaatcattaaactgtcactgagtacctgttagctactgaaaagtaatagtgaactattattaatatatttwaaaaaaatacatgccctcctcctttatcyaggragaggtcaaaatctctgggggcaagagtcaagtataccaatacagtcataccttagagatactgagaatttggttccagatgccacagcaaagcaaatatcttaataaagtgagttacacacaatgtttggtttcccagtacatgtaaaaattatgtttatagtatgctgcagcctattaagtctgttataaaattatgtctaagaaaccatgtacatatcttaattaaaaatactttattgctaaagagttctaatggtcacctgagcctaaacagagtcataatctttttactgatggagagtcttgccttgatgttgatggctgctgataagggtgatggctactgaaggttgcgatggctgtgacaatttcttaaaataggataatgaagtgtgccacattaattgactcttccattcataaaagatttctctgtagcacgtgatgctgtttggtagcattttacccagagtagaactttgaaaattagagtccatcctctcaaactctgctgctgctttatcaactaagtttatgtcatattcyaaaacttttcttgtcctttcaacagtgttcacagcatcttcagcagaagtagatttcctcccaaggaaacactttttctgctcatctgtaagaagcaactcctcatctattcaagttttatcatgatattacagaaattcagtcacatctaattctggttcttttgttatatttccatcacatctgctgttacttcctctcctgaagtctttgaagtcttgaacctttcaaagtcatttatgagggttggaatccaaactcctgttaatgttgatattttgacttcctcccatgaattaagaatgttcttagtggcatctaaaatgctgaatcctttccagaaggtttttaatttattttgcctagattcatcagaggaatcactatctatgagagctatggccttaggaaatgtatttttaaaataataactcttgaaaatcaaaattccttcttgatccatgggctgcagaagatatgttgtattagaagacataaaaacaacattaatctgcttgtccatctccatcagagagtcttagataactagatgcattgttcaacacgtagtaatattttgaaaggaatcttattttctaaggagtaggtctcaacagtgggcttaaagaatattcagtgagccatgtcattaaacagatatgttgttatccatgctttgttgtttcattaattgagcatgggcagagtagatttagcataattcttaaggaccctagaactttaagaagggtaaatgagcattggcttcaacttaaaatcctcagctgtgttagcctccaagagagtcagcctgtccttggaagctttgaagccagcccttgacttctcctccagaaaatctgttatttagcatagccacctttatcarttatcttagctagatcttctggataacttgctgcagcatcttcatcaacacttactgcttcacctttcacttttatgttatcgcttctttccttaaacatcatgaatcaacctttgctagcttccagtttttcttctgcagtttcctcacttcttttagccttcatagaattgaagagattaagggccttgttgtggattaggccttggtttaagggaatgttayggctggtttgatcttctattgagatcacaactttttctgcaccagcaataaggctgtttcactttcttattatttatgcattcactagagtagtacttttaatttccttcaggaatgttttctttgctttcacaacttggctattttgtgcaagagacctagcttttggcttgtctcagttttagacatgacttcctcactgagctaaatcatttgtagcatttaatttagggtgagagaaattgtaactcttcstttcacttgaayacttagaygccattgtagcatgattaattggcataatttaaatattgttgtgtttcaggaaatagggagatccaacgagatggtcagagactagagaatgaccaatcagtggaggaatcagacacacacaatatttatcaattaagtttgccattttatgtggctgtggtgtgtggtacaccaaaaaaattacagtagtaaagtaacatcaaagatcactgaccacgtatcatcgtaacagatataataataattttaaaactttgaaatattatgagaattaccaaaatgtgacacagaaacacaaaagtgagcataagttattggaaaaatggccccaatagatttgctggaaacagggttgccacaaaccttcaatttgtaaaaagcacaataaagtgatgcaaataaaatgaggtacaattgtatttatgtacaatgagttatgtactaaaacaatattcaatattcaactattatggaacagagaaaggctcaactattagtgccattatttatatatatcttaaggtatgctatttgagcttgaaaattatgtttaaacttaaacttttaagtgtcccttctctgggaaattcacctgtatagaatatcttacttctatggaatgctgtataaactttgtgtactcacatacctgtgcatataaagcacatcccatttgttgggcggccacttatccccaaacttaaaataagtaaaacataatgtggatcaatagtatttgaaaacaataaaataactcctgccagtcacaatgaagggcagaaaatactgtgccagttgaggcacatggatccttctgctaggtaaatataattaaaaacaaaatactctcccaacctagaaatcctctccacaaaggtagcaggtaaagaacacrtctgtattattgagtaagagttaaaccagaatgtggtgaacatcataggcaaatctcttcactaaaagattgcaaaaacagcaacttygctcttttatgtagtcaagcagatacaacccattatacatacgtttttaagatacataacatctagtcctcaaataaaaaggacttagtaccacttgtcaggcatagttcattataaatttagccagtaattggggtgaccatctatgttaactaattggtgttatccagaggagaaacaaacttcttatatccttatgacagaaggcagtttttgagttaggtcctaccttcccacagaagctgggagatatggatgctaactctcttgatgttgacatttcaaggagatgatgtgcaagcccttaagacattcctaggtcataagactgacaaaaggcctatttagctttgtaaaggatttatatatgttttaaaggaggagaaagtacttagtattacaagctttctaagaaaatggagaggagggaaatctgtttttttcaatagagagaattatgcttcatattttaaatttttctttgtccttgcactacttatgatggrattctttaggccccagaggaatcatttactcttatttctgacccagttatatagtttgaaatcccacagcagattgtaccttatctgagagcaggcatcttrttggagacagagatgctgactctagcatgatgaagggacaaytgtcaagtctgacactgagagaagcgacaatacttacaaaaagcagatggagaagtgtaaaagaggggaggagagagagtaggatgaaatggrcagtcattcggcttttctaatgggaagaaacaatcctgccacttaggtgactcctgacggcattgttttattaccaaacaaaaattaaaattgacctttaaaaatatatatacatatatatttatgttcactaaaaaattatttaatacattcaatccacagatagtctctaggttgtttgaggtcacattcctgttatgtttaaggatcttcactgatgccctttgacaatgtctctttcaggcttctctcctttttttatagcatgtaagaaaatgtgcacattttctgcacatgagtggtactggtttttataagtattacaggaggggaacacattgttgagttcattggtgatttcacccccaagaaacaaagaccctcctgacccaggaggaaagtagagcagttgcattttataatgaaaatattattgtgtcacattattatgactatttttcagtgggtgattcagtaaatgcagcatatgcttagtaaatatggatgcacagtgtctgaaaccagactgccagggttcaaatcacagcatggccatttactatcatcattgtgaccttgaacaagttacytcatcctttctcatttcattttcstcattgatgaatagtgattattaatagtgctttacctcataagactgtgacgaggataaaaggagttttcagagagacagaaaaagtgaaagagaagatctgtcaaaatagtcaataaatatcaactattatttataaacaattacttacagttgcaaggcttatttcaatctagaaataatatgtgctttaagagaaaatgcatgtttttttaatcacatgtagagagtgtgctttgtaaggatgcaagaaaaaaatattctatattactatatgtctagtaaatgtgtattgtacagctagttatagctgagtttattttgtggattcacaaaatattagtttgaaatcaaattggtattttttgtattttaagtatgttgaactcaattttatgatttctaatgttagtgtatatcttatgggtagaccaatttttttttgcctgtactgacatattttgatgttgrtgtatttgaaaactttgttaacacacatgatctaatttatatagtatgtgtgtttttatcttataccatgtggtaacacatgtttatttgtggactgatttaagaattgataattatacagtcttcacagaactcagaaaaatagtaaatttttacattcatattgggtgtttaccaccttgggaaatatarcaaaaggaagaaatatctaatgtttttgattttctagtattgccgtaagaaaacaaaaataattctctacttgtccactatttctggtcccagactgaaagaaaaaaaaataacttttttttttatgtttctatattttgctaaactacaagtgcttgctgttgagcaagtgtgaagcaagctttctcctaccacttttgatgtcctaaattatgtctttactctgatttggcaaacatggtstaggtaaatcatcttggagagttcttcctagaatgagtttacaaacaaatccactttatacttataaattataataattccgyttatattgattcatcatgaattgtgctcataccctattaaaaaaaaagaaaaaaaaagacactcattagacttaaaatttattagtggcttaattagatccttttcagatcatttttaaaattttgtgtaaaatgataagaaggcactttttaccagatatagtatatcatggcctggtgaatgctttccttttccccatgtcttaatattttatagatttatttctccaaaggacctgtattagttaagttcaggtggattatgtcaataacatattaacacaaaatctcagtggtttcatataacaaaagtttacttmccttttatttttttttctaaaatatcaattatggagccagggctctgttccgtaaagtcattcagggtctcataactccactaaccaaggataatgggaaaacaatctttcctgtgccttgacagaaaaaagaagtgcttcttgttgtgcactaataatatctaccaagatccatgtggctcttttgtccttgaacatatataatagtttgtgtaaattctcagaatttggtgaatacatgggtgttactgtataaactcagatttattaatcactaaatagctctaaatttgtaaataaatttaattcttaaattttaaaagaattttaattaatgtttttacattgacagaaaaagataatctttctcaggttatttttggacatgaaatggcaataaatgactgcattgcctactggcaatgggtgaaaaacatgattgaaagcctaaagaacaagtgccatttttatcctgtgaacagccatgcaaccaaactgcagcaagcaacatactgatatttctgaagagtctcctggaaatttgccaggaagaaaagatgagagattaagaagcagagtacgaagatgaaataattatttattctatttattaaatgtaaaaactttccctttaagttgcaataagaaataaaataagctacttgagaaagaagaatcttactgtattgactttagacatagagagaatcttaaagtgcttctatgaaaaaatacactcatatctaagatatgtagaaagaaattatgcccctttctcttctagtcattgtaaatatcctgtcttaaagagctcaagctattttgctactaacagcaatcatattactcttaagttaatccatcttatrtaccctctataaatcataatctagttaaatacatagcaaaaatggtgaattggctctccttaacctgagtcattttaagttgtacttttaaaaaatcttaccaattgctaaaaagcttaattatgaaaakaacttgcaaaagaaattaatgactttgtaaaacgaaaatggctttaaaatagacaagctctaattaaattgatttggacccaacatctttttattcaacaaacatatgtatttaaaacaattttctgctgtaatgattaattataattttatttttaaactgacaaaaagaaaatagcatacctatttaaatcaagaaaaggtagtttttctttaaaatggagatttttagttttgctaaatttaaaaaaaaagataatgtctcaagtagtaaactaatgagggattgtatgtctgacaatagtctaaaattgtcttttgagccatgtttccttgactgaaagaggaatggaacaaaataattatcttttttttcaatcttctcctctaacatatttctaagccttcagaggttaatagcaattatacaaaagatgccttcccatggcttcaagcctgtcatgttttgttttgtttgtactctagagaatgctctgaggttgattgagttgtgttttgaattaacggcctcacatcacctttcaaaatttgaaacattcttatgacattgtcaaaattagaaaagttgttatcatagttacagttttatgcaataacagattgtgtctattttgtttcactttattttgggatatactaatttgcttcaaaaaattgtatctaggaaataatgagcaatagaatcagagagaattaggtttgaaatataagttttatttaacttctttgagatgtaattatcttatttctaaaatgagattataaatatccatatcttctgaggatcaaatggcataactagtatagtgtctgccatattatatccaattaaaaaataacatgctattcattatttttgtccttactgtttaagccttgtgtttaagtttatgagtacttagaaggaatttttaaatgcctatgatttatttacactttatgctttaaattatgcttgtgaattatttatagaatttttctacaaatactgagccaggaagcatataacattttaatggaaacatagaaagcaataaaaaggttagagttattcattaatataattagttgtataagagtaataagcatatggttgttgatatggtttggctgtgtccccacctaaatctcaccttgaattcccacctgttgtgggaaggacctggtgggggataattgaatcatgggggcagatatttcccacactgttctcgtgatagtgagtaagtttcacaagatcgatggttattataagcggtggggcgggggtggaytcttgcacaagctgkctctttgccaggtgccatccatgttaggcgtgacttgctcctccttgccttccgccatgattgtgaggcctttccagccacatggaactgtaagtccattaatccctttttcctgtataaattacccagtctcgggtatgtctttatcagcagtgtgaaaatggactaaatatttgaaatttggacacaattccactcactaataatctactatatagcataggatgttttgatctgcaagtcacagaaaacctcaacttctagggtagtcctgagttagaatgagcttcaggcatataacaatctgtggctagtcatatcatctagaactcaggctctttccaatattctgccttctgtttgctggtgatcacatcaacttcgggctagaacaagatggcagcagtgtttccaagcaacacttccagactcagccatatcaaagaaaaagaggaactgccactctgttttcttcttggaatcaaggaaattttcctgtgaccctggtagatttttcagaattatccaattcctacaaaatatactagaaagcaaaaattattactaatttaaggatgtaatggatattattagagtgccaatcaaagacaccatataggtcacacttttaggtacccagcatataaacacacattctttccacccataggcatttaaaaaatgtccatgctcactaaatacacattctccagaatgggaaaacacagacatatgtaagaccctcagctcaagtttagggtctctgtgttcggtgaagtcctttccatcaatttagacagtaactgtttattgtctggtgaagaagtgtttcactctctgcccaacttttggtaattggaaaacaggaaagacaacttacatgaacactcttactcaaaacattggaaaatcaaaccgcgatactgatttatagcacattttctattttgctggaaacgtgaatacttttggtttgatagtcaactaaatcccttattctgcaaatctgacagttgtatttgatgaaagctgagatggtaacaactttcttgcccatatcgaaattcagggaatggggatgtggaaaaatgcctcactttgagattgcacatttttaacaggccccttcctattgagtgggtttggtgagctggtttaattatttaattggtttaattatgggatcttactcttggtgaggcttacagttaccttgatattgtagttcccttaagaatttatttggcttctagctcactggagttcagctccacggactggtaacctaggcagagagcttatccagcaagttatttattctgggaagtctagttttagccacaggcctcagagcttcatccacccctctctctcgaccctgtcatcattatcatttaatgacctctgccatgaacggaatcaaaagaatagcctgaagtcagaagacacatatattatgtgttccttctaactgcatttttaaaacaagattgtctcctttactagatgaataatgcctaactggaggtgtttgctagaaatctggggttgtaggatttctttttactttaatcaaatattctgcccagtatccattatcccatctctgcttgctttatctatggcttgagtagaaaatttggcttttccagtcccccaaatttccaaattattgaactttaaagcaatttagattatagcccaaaacctcttcaggcagaattgtattttattctttctctgccttctgatagatcagctttagcctaagcataactctttcttgaaatacctaactgaaagctgcaagaagtagccaaaacaccaatgttctgaaaattttctgtcagtttcccaaatgggcaagcatttagccaagtgcttcagaaccacacacgaaaaagggtaattaaccactaagatttgaagaatagagcaaattgtctttatccttgctttatctcctctcctctgccaatttagtgttttaaagtctgttacttgtggcagcatatttccggtgacatattcggcatcaggatgcttctgtcaacargtaacagaagacattaactaaaccaccttacaaaacaatggaaattataccatttaactaatgtagtgggggtccccaagtgccatgcatgaaggttcagccccactgtaattttcttacctatcgtctttctctaggactggtagcaaaataccttcagctccttaagataagatatttacaatgactagaagaaaaagagaaataatttatttccaggtatcttagaacaagtatatttttcacagaagcacttcagaattattctctcaatgtctaaagtcacttatgtaaaattctttttttcaagtagcttactttattttttattgcaactcaaagagaaagctttttacatttaatagatagaacaaataatactttatcttcttactctgcatctcatttgctcatcttttgtttctggaaaattttcaggagacccttcagaaatagcatgttgcttgctgaggtttggttgcatggctatttacaggaaaaaaaaatagacacttgttctttaggatttcaaccattttttttttcacccaatgaaaattgctgggtcatytgtgacagcctcttttggaaacctgcagttgtcctcagctggggtgagaagttcatattctcccaggcctgccttgagataaagtaaagcactacactttagaagtgcttccttttcatcctaaccaggagtttgaattaggaatagaaacattcctggagcccttcgtctctgccagagtggagagtggyccccttgggagccctccttccttccacccacaacctcagacagcattcaaaccatacaacagccaccccaaacgagctaggtagactgaaaggaaggaagagaaggaaggactaatataaaatgccttagaacatatacttcataattgatgggtcaccaacaagaagtgattacttcacactgcagggaaatacttttctggaaaacaagagacaaaaataattttcggatacctgcgcgctgactctgatctaactctgtagcctgtcctcatcccagtcacctttgttaaggtgtctttgttgagcctgagttctgtacagaaaccagaaaagctcgatattcataaacatttctttaaatgcagaaacatagaatgttaatgtgcatttttctgagatggtgttataagtccaagtatcaaaaagcagtagcaaatattagtttgtgttttcaactctggagtctacctaggccacgtgttaaggacatctgtatacttcattagggaatgagaagccaggaacaattaccttagaatttttgcatctgctgtcactgtcaatacccatttcatacccttatgcattctgtatcctttgctaaataatttctgaatcttaaagtgtgtgtgtgcacgtgcatgtgtgtgtgcatgcatgtatgcatggtgttttcctgaaaactcataaaacacaaaacactgtacactaaatttctgtaaaacaatttaataatatataccaccttatgttacaaatattcttttaaataatttttctacctaggctactctttaaatggttgtcactatattatatacttgttaccatatcaaaactcagtactctaattaatatatactgaattttaaaattgcagtaaattttatcttctcagtgtagtaaaaagacccactaatttttcaagtaaataatcttgttaattccttgctggatgatgttttatgatggtggttatgtgtctcctgtgagcctgttcccacattcaaattattttatgtatatactgagacaaataaaaaatataataaacacacttaactgatacatctgtggaatttttaaatactttaagtgaaatacctactttgtacaagaaaaggttataatattaccatttgaaaaatcaatggtgctttcagattccgaggcatctcagtataaatacatattattatttttactcaaatgcatatctgaaaatattttcatactgtcatgctagaaaagcactaaaattgcttgagaagatagctgatatacatatatctgggctaagaaagcaaacttgagtacaagtgtttgagttaaaacagtcttatgcatactaaatggactctggcaacatcacacatttacctaagcatttagagatggcagttcttcttaatttgttcttaattctgttttcagagtattgtgatattttaatctttggaatgctgatgatttatgagttcaaacttgaagacattttytctgtcagtcttttagtattcaaatcaatgcagggaacacagaattagatctggagaggggaagcaggattcatcctctctggggataactaagcaaattatttggaactctggatgctcttgggcattcagtaggtcaaagtctaagtcctcaaagtaaacagtgatgggtcaaattgctgagagctccatgtgtgtaaaaaacaattctttatagtgcccaacatatctggttagaatatattaattggtggttaaaaatagaatatttattttaaaacagctcgttgatatagataaaattgaactaagatttctaatatttaatgtaaatattattcacttatcattcatgcagcacttgctctatgccagggacaggctttggttcagtgatctcaaaaatarttagtagtgttacccaaattcaagcagtggcgtagattggatactccaattagtggaccctgatcttaagatttagatgtaagtgacttattaagtaagtgctcccaggaagatgtgataagggagtggagaaaacaggaaatgaacgacaaagaaccaggccaatggagagaattcagtggaagtttcagacatagcctgattctgtgggaagctctggagggtaaattacaggtcagaggttgtcctgaccctagacaaagaagtaaggcttttatactcctgttagccaggatgggaggcagtgaggttttggatgtgtggttagtgctgtctaggcacgtccagcaactcctgcaggggagaggacatcagtatgcagggcattcctctgaagggtgagttctaaaggtgtaagcctttcaaagcaaacaagaataaacttgggccaggtatgcacagagctggccaaattgtggtagtcactgctggtgctccacacaagaatatgcaatgttaatcataggaatatgtttggggcaccagaagtgagtcctgtcagaaattcatgttctggaaggggtgctaagccttaaaaatatgagtgtgatacgtgcaataatatattgatattgaaggcacaatactcagaaagggggttggataactccctggatggtaagcatgggaggtcaaagaayacttgagtagaaaaatgaagagacattttaaatgctaatctgcttgctaccataaactaagtattaaaagtgtatgtctggtttgattatcattttttctttaagggagaattaatatttcactcaccgcttagagaaaggtttctcttactcagtgtcttgtgtttgcttttcaagtcctacattgtcccactgaaagaattaattattgtcctgtaaaacctattaaaattctgtcttaggaaaacctattgtcctgcatgtcaaatatttctacagttttataagttccttttgrcttctgcttctcctagcctaatttcctcatcttttcttccaaagtgtatttctcttacccggtcaatgagaccatattctttcctcatgcataagtggtactcccataatcattccatcctcttccagcagcaaggagccaccttattgcctccttaattttttttatgtctctctttaagttagtatgtgtgatttaattccctagaatgaccatttgggattgaattcctgactacctgataaaattacatcacatagaccatgawcccagaatacaaagttgtatgcttttatctgggcytttctatgttctatttcaagacatctgactcaaacaatgaagtgagacatctaatttcatttctgctgcttactcaatgtcacttttaacaatatattaacctctccaagtcttaattccccaatttagaaaagataggtaatagttcatgtgtaagatggttgctgtgagagttataaatgctcagtgcagtgtctgagacatgataggtctttagtagatgacaacaactattaataagaacaataaaaataataatatagtggccttacctcaagtttattaataaggtagaaacacaactcttttaattttactattaaatctttacagagggtttatacatacaaacatacataaaacctctaagttttacttaaagatatacctgtctctgatagatacatatggattctagagtttaaatagtcttgattattttattcctaaagctaacacagcttagaccagtatttctcaaaccaccttaaaaaaactcatatatatgtgtgtatcccataatcccatacatatgtgtatgtataaactcatatatatgtatatcccataatcacatatatacacacatgtattatatatcacatgtatataaacgtgtgtatatattacatgtgtacatatcacacgtataatacatgtgtacatatcacatgtgtgtrtatcacatgtataatgcatgtgaatatatcacatgtgtatatatcrcatgtatatatgtgtatgtatatatatcacatgtatatatacacacatgcatatgtacgtgtgtatstatgtgtatatatatacacacatatatgttattttattttacattcaggagtacatatgcaggtttgttatataggtaaattgcatgtcacaggggtttggcatacggattatttcatcacccaggtaataaacatagtactcgatcagtagttttcaatcctcacccccattctaccttccaccctcacataggttcccgtgtctgttgttcycttctttgtgtccatatgtactcaatagaaacacttatattaagtgacatgttaatgtatgttctggaagaacacaccaaaaaataactaaattaaattttttaaaattttgcaattaaatattcttttacaattcaatgtgtrtatatatatatatatatatatatatatatatgataaataccagacacatttatagagctcttatgatcataaaatctcttatttatgaaggtatttctcattcacaaatctcattataaagttaaagataaattacttgaaatattaarcaagtatatttaacttcttttatttatagacagtttgtcccgttcaatagctggtctgtgttatgtgacttaatttataattttatatggctttgtcatgtcattaaatgcttttattaaatatgaaaagaaaaatgctgctcatttctaacttcaaataaatttttggcatctgctttaatccaagagcccgtttcacctcatggtttcctgattgtgttccattgttgcattataattagaaaaattatacatgggcaactaaatttaaacaccttggattaaaagggaaaaattaagaagagattgtgttataggcataatgacggcagtaacattaagggacacttgaccgaaaggcaataattcaagctacagtactagcattcaataagatgttggttaaatacagtaccttgttaattttgacgtatgaattctacttcatgaacgaccattttattaaccatttcaattagctaacataattagaataattcaataccatgaacacattaatcaaaataggttcttcaataaacatgtctagactttaatacgtcaaccataaattacaatattattttattttagtcctctaacaccaaagggccatattaaataaaagagtatcaaattaaacttaaaagatgtattttattttgctcatttatcattcagatataatagatgggcttttggctttcaaaattatccttcacgtttttctcattttaaatgcatgtccttttttctttataaagatgtttgtctctttatttgtggaaagagctaaagaaactattactataccagaaagacacacacagttccacaatgtcagagtcagggttaaaactcagtaaagtgtcacttgtgcggatgaggttaagggtaaggatggactcactaaatcttactctattcagagtggctgagtcttcaaattctctcttcaggtaactaaattttattgcatgcttgttaagtggcagttattgttctaatagaaggccttttaygtatatgtacttaatcttcactaaaatctcatgagatagaaactctaaaactttaaaattattatttccattaacagatgtgaaattattatttccattaacagatgtgaaaattgtttatagtaatggtttaaaacaattcttaccmcaaattcacattttcttttactcttcccagctacaagttagagttggattatctacattacgaagagaggaaagtgattgtaaaactagactttatttcattcagcaaaggaaattcattggcagggtgagactagtcgagtgagtatttcattgaggtggttaagaaaagaaaaaggtgtgaacaaatgataaaaggtggaataagcttgatgaccttggaaaggtgtcctattgattgttcaggtgacaaatcaggtcatgtattatgtggtagtcacagattatataatttggttcttgtcaattctgtaaataattcattgtgtaacctatgaaaaactctccaagcctcagtttcttataaaataagatatagatatggctttaaatttttttcaattctctaatttttgttatatctgaagttaggctatcaaagataaaccacagccaatcactttcttaagtgtctaatgcatattttgcacaatgctatgaggaggaaaagaagaaagagagaaagaaagaagaaagagaaagaaagaagaaagasgaggagagagagaggggaaagaagaagtggggaggaaaaatcatattcttcagtttataatttagttgtcagaacaagagcaaacacatgtttaaaattttgtgaacaattccttcatggcaacaaaaaagacatggtgattttaaaatttatatttgttctaatagtcttaaccaggataaatgaccagaaagagagtaatggctattgcagtatgtaaagaagactagagtaggagttggaagatttggaacaaatcccaattttgttgtatcatccttatttagtgaaaatgttaataattattaagcatctgtcatgaattaggtaccttgctaactaactactttatatattttaataatccacaattgtagtgtgccagagttggagccttcaasttttagtgattaattgaaaagcacaacttatttcttcttgtgctatggactttttaatgagtcctcatattcagaaagccgtagaagtcaagtgggtagttacttaatgttggctaggcagttgatttaytgagtctgcaatagatgctaactttccctggttgattgggagaaaaagtcaatggaaagtaacaaagaaagcttcattacatttctttgctattcatacaagctttcagtgctagtgaatgttttgtgcaattgctcaaagtattatattatttgggagcatggaaaatgttttcgtgtttacttgttgttttcctcaagaaaatttccagagctaggtataactcacaaaatcttttttcagtcttataaagaatgagaacacttgttaaatgtgccaacctccctttagcrgaaacagctccattaagccagtatatttggcactttctcaatgcacgatgtgtgtgtggggtgtgtgtgtgtgtgtgtgtgtgtgtgtgttttagtttatgaaaccaatttaaatgctgcattcctaaaaagctggctatgatcctcaattttacagagaagaaaagacgttttgaaatcgtttaatataccaccaaatctgaatgccaatgagctacaatttaccagtaacatacattctttattaatattaccttcttttgctttcagaaggcatgtagggagaaggccataattagaatatatgkatatatatttatttatatttatatatatatgtatatatatttgccaatctagaatttctaatctccatacactttggcaactattggggaactaaaagatgtatcatggaaaaacaaattaaaatgttaaattcaaggacacagtgctttgaataaaagcctcagataatgtgaacttgataagctcatcagatataaatgaaagatctkgcataaatgatagatttcgtgacttgggggactaaagaagttttaaaatgcatctaatactaagcactcttttggagaattaatgtaaaaactaaatcattgacctgtagaaattaggtaataacacttactattattgcacattatcaatttatgagatgttacattgtagtcctaaacattgaggctgaaacaaatcttaaaagccctcattattactttactctttgggtagatattattactggaagtatcatagaatgtcagacctagaaaggagtaaggaatggaactaatcctcttatttacataggaggaacatgtaaaggcaatacagttgtgattgtctgaggtcatgtgatttttgtctgtgtacatgggacttttacttgctcctttaaaggaatctcaatagcttataaatgtcaaaaggaaaaaccaatcatctctttacattagcacattttatttcatttactgatattattaagccaaatatttatattttaataccctagtaatgatatttatattttttcaaggaatttttttacattgttgcataagattttcatcatactttatgagtgcaagcacttttactattatatgtgagtcttattaatgttaattatttagaaatagagatgacacaaagagctaggtaacaaaacaataaataaattcaacagtaaaacattttgaaatgcaaatattttaaataaaaatttttaatgaataaaagtatgcatgttcttgaaataaatacttttattaaaaactcatcggttacatttccaaaatataaatctgataccaactatcaattttagtttataggcagtgaacattaaagctggattaacatcatgctgattttgtttttcattttctttttaattgaaaataaagtgtgccaccagtcaaggtgaataatgtctatagatttttcacctgtgttttgtggctgaatttatttacacccacattaactgattagctcctgccatgcagttccatattcatcaattatttatgaaaatgcctcattgtatttgtcatatatgtatcagtttgaatgacaagatggctcttctaatatgctggtattttactatagttaaaataatgagaaactggtaatttttttttaatgccatgaagataaaggtgtttaagtcctgttaagcagaattaaccaaaataagagctttcccaggtaaacacttggttttgtattttacctaattatctaaattcaactgtatgacacgtcctaattgaataacgatggtaatttctgtgatagagatgaaaagcacataaacttgttctgaagttcgcttaccatcatagcatatagacacgtaaacaaataatttcgatatagcttgataatcattaaaacctaacacttcttatttagcactttgtgtgccaactctgtttttaatagtttttcctaatttactccttccaacaacctttaagagtgggttctattactctccatttcacagaggagaaaacagcagcacagaaagcatatataacttgcctaaggtcacataattagatacctgtggagctgatatttgaaatcaaacagcctgagactcagaacaaaacagcagagtgttcagttgtagcagagggatggtgctgaattacagctgggaaaaaaatgaataagaatgtgctagttaagggctgcacagtggtggaaggaaacagggcaggcatgagaggaaggatgagaacagatacagagcattctgggatgagataagagacttagtgagggcaaagagctatgagactgtggctgcgtgtaaggaactaagcaggttcttcttacctcagccatatttctcaaagtgagtctccagactgtctgaagaaataagtgcttggatacattttgaaaatacagattcctagactgtgatagacctactgagacagaatctctgcagtgaattcccaaatgagaattttaatagagcacgtcagattatttattatacatcaaaagtttcagaagcctgcgcaagattgtaaagttcaagatgagaagtgtcagaagatgcctttgacttgtcttctttctgattatgttatttcacataacataaaaaaccaatatttcaaaatacatactaaatgtaaacaaagattaaaagcacctgagtaaaataagcaatctaacagacaaaaataaaccattctttgtccagatccttacttcatttatcctgtaaggaaattatttaaaaaaaaacaattcttacctacttttattgagacactacatttcccccgcccacaatcatttcagttcactatttttgctatccgcataaacctttagtgagtctttcaaaagatatgaccaagtccaaccctcattcatttaacataatgattctsaatcctattggcaaatagtgacctgagatactttttaataaaaggcgtatgaaaggagaacaattgatttgcaggtatttttccctgtatctactatgcaaaagtcttttcaccctatactctcaggaatacatgtataagaagtgtaatatccatagggagcttgaaatccagaaaggatataagacaggcccacacacacaaaatgtaataaagttaaaccattgtaagagcttcaaagaggtgcagataatgcataggagttcagcaaaatgcaattattacttaactgttgaaatcattagggaagttttcatggaggattgggcatttgaacttggttgtaaatgatggatggacttgtgatattaaggttaccaaacaagagcattttcaaatgcttaggtggagagatcattatgaatgaaagctagaaagctttcatagtaattgtggttaaagggattcttggaaaacagattacagttttttatcttgagagggacttaagtaggggtgataagaattaaaagagaagttgttctcactctgaggatactgaatgcaagcctacagagtaaggaatgtagtcagtgctctgtgtgtgacattgaactcctttagcaaaggaggaaaatgaataaccaagtttcagagagaactgacatctaggtgtgaaaagaactagagaggagagagactgagttacaggaactcttaagataaaatcgagcagacaaggaatatgatgtttcaaatccaatctgtagtgcaatatagagatgggaacctgggaatgatagagttggcaaagcattccccatttacaaattgatcttttccatgcatttcgtcattctttctttctctagaaagtgaattgttaactttgtcaatttctatgatataaatgatccaactatggtcaattttaaactaccaatgtaatgtattgaacctgaatttgggacatgttggcaggaagttttcctctgttaactgaggtctgacttgttagaggcttgtgaattaaccgacaatagacaggttaataggaggaaagtttattacacatgaaaaactagccagtagtgaggaactagaggttacggtttgtaaaccaactcaacaagagttgattggataatttgactcatgcctgtaattccagcactttgggaggctgaagtgggaggatggcttgagactaggagtttgagaacagcctgggcaacatagtgggactccatctctacaaataaaaaaattaaccagggtggtggtgtgcacctgtagtcccagctactcaggagactgaggtgggaggatcgcttgagctcaagaggttgagggtgcagtgagccatgatcccaccactgcactccagccggggcgaaagactgagaccctatctcaaaacaacaacaataacaacatccaagaaggaaggaaagaaagggcagcttagacttcaatgcaaaagtgtggaaggtccttgctgggtaccttggctcatgtctgtaatcctagcacttcaggaagtcgaggcaggtgagtcacttgaggccaggagttcaagaccaggctggcgaacatggcaaaatcccgtctctactaaaaatataaaacattactccagcgtggtggtacacgcctgtaatcccagctactcagaaggtcggggcatgagaatctcttgaacctgggaggygaaggttacagtgagtcaggatcaagcaatgttaatgggcagttgaatcaattgaatttatacttccctgtgctagggttagacttcccccaaacagaaagttctctcaagacaaggtccatggcagctatattgtgggggaggttctgcttaagtttagaaaatgtctctctgtcgttgctgactattcagaagttttcagtttaaagtaatttttgtaccactttggtaggctgttaatcccttcaggaaaaaatgtacaaagtacactcaaagagcactggcaaggcagcttctgccttctgctgtatgaatctgccataatctgtatgtttgtatccgttcaaaattcatacattgaaatctaatcatcaatgtgatgatggtaggatgtgggacctttgaggggtgattcagttatgaggttggagccctaataaattagattagtgcccttataaataaaccctacagagctgcttatttccttccaccatgtgagcrcatagctagcaggcaccgtctatgagccagaaaatgggcccttaccagatattgaatctgccagtgcaatctgcttatgtctcaatcttttttttttttaattatactttaagttctagggtacatgtgtacgacatgcaggtttgttacatatgtatacatgtgccatgttggtgtgctgcacccattaactcgtcatttacattaggtatatctcctaatgctatccctccccactcccctcaccccacaacaggccccggtgtgtaatgttccccttcctgtgtccaagtgttctcattgctcaattcccacctatgagtgagaacatgtggtgtgtttggttttttgtccttgtgacatttgctgagaatgatggtttccagcttcatccgtgtccctacaaaggacatgaactcatccttttttatggctgcatagtattccatggtatatatgtgccacattttcttaattcagtctatcattgatggacatttgggttggttccaagtctttgctattgtgaatagtgccgcaataaacatacgtgtgcatgtgtctttatagcagcatgatttataatcctttgggtatatacccagtaatggaatggctgggtcaaatggtgtttctagttctcgatccttgaggaattgccacactgtcttccacaatggttgaactagtttacagtcccaccaacagtgtaaaagtgttcctatttctccacatcctctccagcacctgttgtttcctgactttttaatgattgccattctaactggtgtgagatggtatctcactgtgattttgatttgcatttctctgatgaccagtgatgatgagcatttgttcatgtgtctgttggctgcataaatgtctgcttttgagacgtgactgttcatatccttgcccaatttttgatggggttgtttttttcttttaatttgtttgagttctttgtatattctggttattagccctttgtcagatgagtagactgcaaaaattttctcccattctgtaggttgcctgttcactctgatggtagtttcttttgctgtgcagaagctctttagtttagttagatcccatttgtcaattttggsttttgttgccattgcttttggtgttttagacatgaagtccttgccyatgcctatgtcctgaatggtattgcctaggttttcttctagggtttttatggttttaggtttaacattgaagtctttaatccatcttgaattaatttttgtagaaggtataaggaaatgatccagtttcaggtttctacatatggctagccagttttcccagcaccatttattaaacagggaatcctttccccatttcttgtttttgtcaggtttgtcaaagatcagatggttgtagatgtgtggtattatttctgagggctctgttctgttccattagtctggatctctgttgtggtatcagtaccatgttgttttgcttactgtagccttatagtatagtttgatatcaggtagcgtgatgcctccagctttgttcttttggcttaggattgtcttggcaatgtgggctctttttttggttccgtatgaactttaaattagttttttccaattctgtgaggaaagtcatttgtagcttgatggggatggcattgaatctataaattaccttgggcagtatggccattttcacgatattgattcttcctacccatgagcatggaatgttcttccgtttgtttatgtcctcttttacttcattgagaagtggtttgtagttttccttcacatcctttgtaagttggattcctaggtattttattctctttgaagcaattgtgaatgggagttcactcatgatttggctctctgtttgtctgttattggtgtgtaagaacgcttatgatttttgcacattgattttgtatcctgagactttgctgaagttgcttatcagcttaaggagattttgggttgagacgatggggttttctaaatatacaatcatgtcatctgtaaacagggacaatttgacttcttcttttcctaattgaatatgctttatttctttctcctgcttgattgccctggccagaacttccaacgctacattgaataggagcggtgagagagggcacacctgccttgtgccagttttcaaagggaatgcttccagtttttgcccattcagtatgatattggctgtgggtttgtcataaatagctcttattattttgagatatgtcccatcaatatctattttattgggagtttttagcatgaagggctgttgaattttgtcaaaggtcttttctgcatccattgagataatcgtggtttttgtctttggttctgtttatatgctggattacgtttattggttttcatatgtttaaccagccttgcatcccagggatgaagcccacttgatcatggtggataagctttttgatgtgctgctggattcagtttgccagtattttattgaggattttttcatcgatgttcatcagggatattggtctaaaattctctttttttgttttgtccctgccaggctttggtatcaggatgatgctggcctcagaaaatgagttagggaggattccctccttttctattgattggaatcatttcagaaggaatggtaccagctcctccttgtaccactgctagaattcggctgtgaatctgtctggtcccgtactttttttgattggtaggttattaattattgactcaatttcagagcctgttattagtctattaacggattcaacttattcctggtttagtcttgggagggtgtatgtgtccagtaatttatccatttcttctagattttctagttcatttgtgtagaggtgtttatagtattctctgatggtagtttgtatttctgtgggatcattggcaatatcacctttatcattttttattgcgtctatttgattcttctctcttttcttctttattagtcttgctagcagtctatcaattttgttgatcttttcaaaaaaccagctcctggattcattaattttttgaagggttttttatgcctctatcgccttcagttctgctctgatcttagttatttcttgccttctgctagcttttgaatgtgtttgctcttgcttctctagttsttttaattgtgatgttagggtgtcaattttagatctttcctgctttctcttatgggcatttagtgctataaatttccctctacacacagcttttagtgtgtcccacatattctattatgctgtgtctttgttctcattggtttcaaagaacaactttatttctgccttcatttcgttatgtacccagtagttgttcaggagcagattgttcagtttccatgtagttgagaagttttgagtgactttcttaatcctgagttctagttttattgcactgtgttctgagagacagtttgttataatttctgttcttttccatttgctgaggagtgctttacttccaactatgtggtcaattttggaataagtgcagtgtgtggctgagaataatgtatattctgttgatttggggtggagagttctgtagatgtctattaggtccgmttgatgtagagctgagttcaattcctggatatccttgttaactttctgtctcgttgatctgtctaatgttgacagtggggtgttaaagtctcccattattattgtgtgggagtctaagtctctttgtaggtctctaaggacttcctttatgaatctgggtgctcctgtattgggttcatatgtatttaggatagttagctcttcttgttgaattaatccctttaccattgtgtaatgtccttctttgtctcttttgatctttgttggtttaaagtctgttttatcagagactaggattgcaacccccacttttttttgttttccatttgcttggtagatattcctccatccctttattttgagtctatgtgtgtctctgcatgtgagatgggtctcctgaatacagcacactgatgggtctttactctttatccaatttgccattctgtgtctttcaattggagcatttagcccatttccatttaaggttagtattgttatgtgtgaatttgatcctgtctttatgatgttaggtgtttattttgctcatcagttgatgcagtttcttccaagcatcgatggtctttaccatttggcatgtttttgcagtggctggtaccggttgttcctttccatatttagtgcttccttcaggagctcttttagggcaggcctggtgatgacaaaatctctcagcatttgcttgtgtgtaaaggattttatttctccttcacttatgaagcttagtttggctggatatgaaattctgggttgaaaattcttttcttttagaatgttgaatattggcccctactctcttctggcatgtagagtttctgccgagatatcagctgttagtctgttgggcttccctttgtgggtaacccgacctttctctctggctgcccttaacattttttccttcatttcaactttggtgaatctgacaattatgtggcttgaagttgctcttctcgaggagtatctttgtggcgttctctgcatttcctgaatttgaatgttggcctgccttgctaggttggggaagttctcttggataatatcctgcagagtgttttccaagttggttccattctccccatcactttcaggtataccaatcagacctagatttggtcttttcacatagtcccatatttcttggaggctttgttcatttctttttgctctttattctttgaacttctcttctcacttcatttcattcatttgatctttaatcactgataccatttcttccagttgattgaattcgctactgaagcttgtgcatttgtcacgtagttctcatggcatggttttcagctccatcaggtcatataaggacttctctacactggttattcttgttagccattcatctaatcttttttcaaggtttttagcttcttttaatgggttcgaacttccttctgtagcttggagaagtttgatcatcttaagccttcttttctcaactcgtcaaagtcattctccatccagctttgttccactgctggtgaggagctgtgttcctttggagggagagaggtgctttgatttttagaattttcagcttttttgctctgttttttccccatctttgtggttttatctagctttggtctttgatgatcatgacataaagatggggttttggtgtggatgtccttgctgtttgttagttttccttctaacagtcaggaccctcagctgcaggtctgttggagtttgctggaagtccactccagaccctgtttgcctgggtatcagcaacagaggctgcagaacagcaaatattgctgaacagcaaatgttgctgtctgattgttcctgtggaagcttcatctcagagaggtacccggccatgtgagttgtcagtctccccctactgggggttgcctcccagttaggctattcgggggtcagggacccacttgaggaggcagtctgtccattctcagatctcaaattccatgctgggagaactactactctcttcaaaggtgtcagacagggacatttatgtctgcagaggtttctgctgccttttgtttggctatgcccggcccccagaggtggagtctacagaggcaggcaggcttccttgagctgtggtggtctccacccagtttgagcttcctggctgctttgtttacctactcaagcctcagcaatggtgggcgcccctcccccagtctcactgcctcctttgcagttggatctcaggctgctgtgctagcaatgagcgaggctccatggtcgtgggaccctccgagccaggctcagaatataatctcctggtgtgctgtttgctaagaccattggaaaatcacagtattagggtgggagtgacacaattttccaggtgccgtctgtcacagcttccctttgctaggaaagggaattccctgaccccttgcacttccggggtcaggcgatgccttgccctgcttcagcttacgcttgttggactgcacccactgtcctgcacccactgtctgacaagccccagtgagatgaacctggtacctcagttggaaatgcagaaatcgcccatcttctgggtcgctcatgttgggagctgtagactggagctgttcctattcagccatcttggaaccactccctatgtctcaatcttaaacttcccagcctccacaactgtgagaaataaatttccgttgtttaaaagttacctagtttatggtatcttgttgtaacaaccctaatggactaagactgaaaaccacctaaaaattgccctttcacatggtgaattaaattatttaaaaacaaacaaagtggcctggcatggtggctcacacctgtaatcccagcacttttggaggttaaggcgggaggatctcttaagccccaaagttgaagtctgcagtgagctgtgattgtgctgctgcactccagcctaggtgacagtgagaccctgtctctaaaaagtcaattaattaattaaaattaagattaaaacaaataaaaccacaacaaaagttaaagataatcttaatagcagagatttttgcaaaataggagagaggatgccttcagtaattaggattcagctgttagggctagagagattctggtgaatactacaggttttcttgagagcttgagagaatttggacaaggaaaaattacagaaaatgaagtaaaccgttgattatccccctaaagtttagaacatatgctatacagcaaaacaaaatttgcacattgtgtgtaaagttgaagtatattctttctgtttattctgctcattcccttatgtagtttttattgtaaattgattagcttgtcctgggtatgtttgccacaggatatgctaaaccatttgtcctttttgagagggtttgtgaaagaatgagtttgatgaagtcatgacttccaagtagcataagctcaatagtggatttttaaaagccatacccatcatgttatgaagcttagagaagaggcaggtgtccatcttattcctccttataatttcctaaccactgtcttttcctgctcccctcataatttttggcaggaagcccatgccatcagactgtatcacttgctacccctcttcattgtagtcttcatcccaaccccagcacactcttgtctattctttgaagattatagtcctcactcatgttcattatttccaatgttgcttctaaaatagtccatgtttagacacatagcttatctttgtctcaccttggattttagctccttgaactgttttttttttcaataatcttgttctcaatcctatctccgccagtgtagtcattcacagtgcacctctactgtgatgtccatttggaatttcaaacttaacttgaacaagctgaattactggactttacacttcaaatgtgtacatgtgtaccttttgccatcttccctatcccattaaattcctacagaatctgtttacccagacaacaccttggaaatcattctgccttctcttttctctcatagcccatatccaaactatgaggaaattctgtcatttctaccttaaaaaaaaaatatatatatatatatataatattcaaacagtttttactacttccactgctaaaaactttgtccaaacatccattatctctcaaactgttataatcactttggagtggtctttcagcttccacactcacccttctacagtgtctttgtaatggtgcatttgccatattttattcatcacaagtgcactgtgaaatccagcccacactcaaggatgacatgagagtgcaaatacaaggaggtagggatcatttgtgaacatgctagaagccacctacctcaggcagcacagctagttgtaacgagtaggcctcactctcagaatttaaagctggaagcatcctagcactctgtagcagatgcagaacacagctttcggtttacaagctgccaatattatcctacctactgaacttaaaaagccccagaatggaaagatactctttcctttcatttcagtgctctatcagccaaatctgtcaatgaaaaatggatctgtgtagttcaaggtcaaccagcagcagtttgcacctcctgaggctctgtgttttagctaaagctacctgtggtctttgtcttttctgatgttgttggacccagaggctttgctgagacacattcatctcacaagccatcatttcagtctcacaagactatataaaaatagcgtcatgcctgagggaaaagcctccataagcttcagacaaccttccaggttaaaccttcttatgatctgaggcttaatgttctcgctcagaccttagcagtaaaaagccaactgtacaactgctgagcagaacacacgttctctgcatgtgatcctgctagcaaaagaggaataagcagaaccaaaaacactgagttcattcaccccaaatttattagcaagaaaagtaatatttctttgctagggagaaaggctgggagtgtaacactagtagagcttctggtaccgggaatgaggaatgaggaataagtgttcctacccatcctcagaacttccaaatattttctttgttttataattttatgatgttttctttaatatgtaaaaaaatcaacatagtcacttaggtcagtctttgtctttattatttatttatgtttatgttcagagaagccctccttgttctattgtaactgaaaggtaatttttacttacattttcttcaagtggttcttgtgggctgatttatatttagtattttaatccagttatagtttactataatgcaatttaaggatctgattttttcccctaaaagttaacgaattggtaaatcacaacctattaaatatcctgatcaatttctctttgccagttgaagatatgatacatttagaaccctcaaactcctcaagtggtagtaaaaattaaggcattagctttggagggaaattgataatatatgtgaagctattcaattgtgtgcatagcctttaactgagactttataactctacaagtgcatttaaagaaatattcacatatctgtcttaagaatgtcatcacaacattatacagaaaaaatggaaatacaaaatatctaatgacaggattaatgaagttatttttatatgatggaaatttattcattccatataatgtaaacttaagaaaaatatttgatgtaagaaaaatcctgagaatatagctaggtgcaaagtttagatagaaattattatatacattaatgatgcattaatgattatattatgttttaaaatttttatctatttctcttcaacttttactttgagttcaggggtacatgtgcagggtgtgcaggtttgttataggtaaatgtgtgccatggtggtttgttgcacagagcatcccatcacctaggtattaagcccaggatccattagctattcttcctgatactctcttcccgctcaaaccccctccaacaggtcccagtgtgtgttgttttcccctatatgtccatgtgttctcatcatttaggtcccacttaaaagtgagaatatacagtatttggttttctgttccttcactagtttgctgaggataatggctttcaactccatccatgtccatgtaaagggcatgatcccgttcttttttatggctgcatagtatattatggtgtatatgtatcacattttctttattcagtctatcattgatgggcatttaggttkattccatgtctttgctattgtgaatagtgctgcagtgaacatatgcatgcatgtatctttataatagaatgatttatatttctttgggtatatacccagtaatgggattgctggttcaaattatatttctgcctctaggtctttgaggaattaccacattgtcttccacaatggtagaactaatttacacttccaccaacagtgtaaaaacattcctttttctctgcaaccttgccagcatctgttttttttttttttttgactttttaataaccattctgactggtgtgagatggtatctcatagtggttttgatttgcatttctctagtgatcagtgatgttgagcttttttgtttgtttgttggctgcatgtatgtcttcttttgagaagtgtctatgcaagtcctttgcctgctttttaatgggattgtttgttttcttcttgtaaatttgtttaagttccttctagactctggatattagacctttgtccctttgtcagatggatagattgcaaaaagtttctcccattctctaggttgtcacttcattctagtgatagttttttgttgttgttgttgttttttgttttgttttgttttttgctgtgcagcagttctttagtttaattacatctcattggtcaatttttgcttttgctgaaattgcttttggtatttttatcatgaaatctttgctcatgcctatgtcctgaatggtattgaccagattttcttctagagcttttatagttttgggttttatatgtaagtctttaattcctctggagttaatttttgtatatggtgtaaggaagaggtacagtttcaattttctgcatatggctagccagttctcccagcaccatttattaagtagggagtcctttccccattacttgtttttgtcagctttgttgaagatcagatagttgtacatgtgtgatcttatttttgagttctctcttctgcttcattggtctatgtgtctgttcttgtatcagtaccatgctgatttgattacttaagccttgtagtatgatttaaagtcaggtagcatgatgccttcagctttgttctttttgcttaggattgtcttggctatttatgctcttttttggttccattggaattataaactgtttttttcttgttctgcaaggaatgtcaacatggtttaatgggaatagcattgaatgtataaactacttttgggaagtatggtcattcagatgatactgattcttcttatccgtgagcatgaaaggtttatctatttctttgtgtcctctctgatttctttgagcagtgatttgtagttctccttgaagatatccttcacttcccttgttagctgtattcctaggaattttattctttttgtagcaattgtaaatgtgaattcattcatgatttggctccctgcttgcctgttgttagtatataggaatgctagtgatttttacacattgattttgtatcctgagactttgctgaaattgtgtattagcttaagaagctttagtgctgatatggttgggttttctagatatagcgtcatgttatctgtaagcaaagataatttgacttcctataatcctacttgaatatgctttatatctttctcttgcctgattgtcctggccagaacttccaatactgtgttgaataggagctgtgagagagggtatctttgtcttgtgccagttttcaagaggaatgcttccagcttttgcccatttagtatgatattggctgtggatttgtcatatgtggcttttattattttgaggtatgttcattcaatacttagtttattaagagtttttaaacatgaagagatgttgaattttattgaaggccttttctgcacctattgagataatcatgcggctttcacttttgttctgtttatgtgtcaaatgagaattactgatttgcttattttgaaccaaccatgcatcccagggatgcagccacttgatcatggtggataaacgttttgatgtcctgctggatttttttttttttgtcagtattttattgaggatctttgcattgatgtccatcaaggatactggcctgaagtttttttgttgttgtatctctgccaggtttggggatgatgctggcctcatagaatgaactagggagaagtagtcccttctttttaatttcttggtatagtttcaatagaaatggtaaaagcttttctttgtacctctggtagaattcagctgtgaatctgtctggtcatgggctttttttgtatttctgttgggtcagtggtaatatccccattgtttctgactgtggatatttgaatcttacttcttttctttattagtctagctagtggtctatctatgctattaatttttttcaaaaaagtagctcttggatttgttgatttttttgaagtgtttgtcacagtctgcttcagtgcagctctgattttggttatttcttgtcttccgctagttttgatatttatttgctcttggttctctagttcttttacttgtgatattaggtttttaacttgagatatttataactttttgatgtggacatttagggttacaaatttccttcttaacactgccttagctatgtcccagagattctggtatgttgtatccttgttctcattcatttcaaaggacttcttgatttcttccttaattttattatttacccgaaagtcattcaggagcaagtttctgaattttgatgtaattgtatagttttgagtgaatttcttagttttgatttctagtttgggctgtggttcaatagtttttttatgatttaaaatcttttgcatttgctgaggcgtgttttacttctaattttgtgatcaattttagagtatgtgtcatgtgacaatgagaagaatgtatacactgttgttttggggtggagagttctgtagatatccgtcaggtccacttaatccagagctgagttcaggtcctgaatatttttgttaattttctatctcggtgatctgcctaatattgttattggggcattaaagtctcccaytattattgtgtgagagttgaagtctttttgtaggtctctaggaacttgctttatgaatctgggtgctcctgtattgagtgtatatatatttaggatagttagcacttcttgtcgaattgaactctttaccattatataatgtccttcgtctcttttttttttttttaatcattgttggtttaaattctgttttgtcagatagtaggattgcaacccctgcttttttcttttttccatttccttggtaaattttcctccatcccttaattttgagcctatgtttgtctttgcacatgagatggatcttttcaagaagcacaccgatgggtcttttttctttatctagcttgccattctgtgtcttttaattggggcatttagcccattgacattcaaggttaataccgttatgtgtgaatttgatcccgtcataatgatgctagctggttattttgcagacttgtttaggtggtagcttcttagtgtcactggtgtgtgtacttcagtgtgtttttgtagtggctggtaacagtttttcccttccctatcacgtgcttccttcaggagctcttgcaaggcaggcctggtagtgatgaattccctaagcatttgtttgtttgaaaatgatcttatttctctttcacttatgaaccttagtttggccagatataaaattctatgttggaaatttttttccttaaggatgctgaatattggcccccactctcttctggcttgtaggctttccactgagaggtccacttttagtctgatgggcttccctttctaggtgaactggcctttctctctggctgcccttaacctatttttttttatttcaatcttagagagtctgatggctatgtgtcttggggttaaacttcttgtgaagtatcttactggggttctctgcattttctgaatttgaatgttggcctgtcttgcttggttggggaagttcttctggatgatatcctggagtatgttttccagcttcattccattctccccatctttttcaggtgccccaatcagtcgtaggttcagtctctacataatcccatatttcttggaggttttgttcatttattttcattcttttttctttattcttgtcttcctgtcttatttcaaaaagatagtgttcaagctctgaaattctttcctatgcttgatctattctgctacctgtgattgaattgtgaagttcttgtgttgtgtttttcagctccatcagacatttctctctaagtccttctaagtctctttcagtcccagtatgagaacctggaaatttcagttgaaaacgttgaattcattcgccccttttcattcctctctgtgagtgccatggaccgcagctgcttctattcggccatcttggatcttttcctttcaaatctttaaatatctacttttaaatatctaaaaatatatattttatttgtgattgtctttgaatagttggaattttgttcctttttctatctatttattcgtttattcctttttctagtttgtacttttaatacttgcttgtctcccctaatgaacttaaggtaattggaggcaaagattttttcttattaagcacacattatagtatcttgttcattataggttctcaagactgtcagttaaatgtcgttaataaaactagaaaacaattctgactggttggacactgctgaacataccaagaatatttaataagataaatgaactgagggatatgaagattcaagtcatagaccaaaacataaagaggccttgccacaattggttcagatccccctacatagataaggggtcagagacagaatttctttccctgggaaaaattgtgggttaaaatagggactcagcctccaagtatctatatagcaccttgggggaatgctacaaggacttaaaggttcaaataaatatatgaactcctagaattttgacataaagttagaaactgcagttttctaaaatcgaagcaaacaagagcaagataaaaccaataagcttagttattgttgcagtaaccaataccactatcaataaaaataagctggttttaaaaatattactaataaaattaggtatttatcttctcaattacactgcagtgtatctggcatgaaatagttgtattttctatagtagatttttttgtaaataaatgagctagtatgaatggtagtcattgtggtgatgctctaacactgttcaaatgagaaagtgccctgattctgaatgatttatatttatttatatatttaccataacttgatgttagcatcttttgagaggatccagttattgcttcctacctttatatgaaacaaagaacctttaggtctgtagtgtggtttctgagtgattctgttcaccaaaagcaaagaactttataaatagattaccaataattcttatgctaagtttagtttccattattagttaatatgttggccagtatctgacaaagtacagttcattattcagttaattttgaatcatccccacaaaacctactcgtccctatgtgaattgatgtagtttaatttctgaaccttccaaactaaggaccaatttctgatttcttctgtgagattcactctgaagggatgagctgggttattgccttgccayagcctagtaatttgggttattctagggtttggtcacagctttgatttagctttcagttagtgactaaacactaaagcaagagattagtaattggaattgtatcacaagatcagagtagagctaagagcaaagctaagtcaacactgagacaatcatctcttgggatattatatctcccagctgtcttagattattgataccaggaggaaagaggatttaaaaagctgctttctgtcctctctgtgatttcaggagggtgaaccagagcttttgtttaccttyggatctgtactaaaagccttttcaagtagagaatatatggtgaggcagtgggaaaatactcactcttaagccttatgtggatgtgtatactggtagaatctctatgcaggacaattttgtaatattattcaaaattacatttgaatgtatctttcagcccagtaatttcacatctcaaaatatatcttataggtaaatttgcagaaaatataagattattcacttcagctctgtttgtaatgcaaaagagaatataacactagttaactacattataatatacccataaaatgtaatactatatagtattgatatacagtcataacaaatagtaggggaacccattatacataaatatatggtaaaacagcaagtttaataataatatatatattaccctatatrtataaaaataaataactgtatataaatatttgtgtatatttttctatttttaaccatataacatctgtagaaggttatataatacattgctaaaattggtggcctctggatggctggtcactagtggtaaaagaaagacattatttctggaaaaatatgttgtactttttgaattttggactatgtgaatatgttatccaaattaaaaatatgtacaaaaatttttaaaaagtagtaaatacttttatatccaggcatttttgtgataaagtcttatgatgttcccaattcaaaaatatataacctaagctccaaaaatgtagaaagtaataaactaacttgctattatataaatattgttaactttccagcctagaataaagtggtatcatggctgtctacttttgttagccaattctaaattttagattttataacttgaaacttctcaatcatagtgcttattcccatacagttatgtgctgtataattataatactgtatttttactataacttttctatgtttagatatggttggatacacaaataccattgtgtttcagttgcctacaatattcagtacagtaacatgctgtacagacttgtagcctgagagcaatacgctaaaccatattgcctagatgtgtagtagactaagctatctaggtttgtatacgtacactctgtaatgtttgcacagtgacaaaagcacctaacgatgcatttcttagaatttctcttcatcattaagcaacacatgtctatatgagacataatgcttacatattagacacactgttttgtgaaaattatttgtccatgtagagctggattatcaatataccaaagattcccttggaacttagtgtatttcttgccatttcctagattgactcagtgttggatttgctcctaaggatgttccatctacttggtgacttcagtcaattcagacagaaacacgttcttatgacctctggtgtgttagctgaatgagagcatctacttttcaaaattccaccacaattcccagatttgagctttgtttaaataatgcggcttctgtgccattttgtgactggcaggaaatgttgattaggccttgattatatgctcacatctattttaagggttttggaccagcagtattcaaagcaaatggattgaaagtttaggagaactcactccccaatggaaaaccagaatgttaacaagtgaaatgaactggatgctaggaaggcaaaaacagcagctataaactctaagaatatattataaagaaaaaagcttgcattttcacttggaggaaacaagaccagtaaaagatgtgaccggaatggaaaaggttgttgaaccagactaaagtacaaggggtagtccagatttagagattaaactcaatttcctatcgctcttgttttggtttactgctaaaacaacaaacactgaggcatggaatatgcaccacttagagaatgaagtagtggaatcagccttgttcctctgagaggagtgcctgtaattcagaagtcagcaccctggattggaggagtccaggcctcttggcttcttgccttttgcaggtataactagtgaaggacacacattagacactgaaaatctacccactaatatgtatgtgtgtttatatatatatatacacatatatatatatacacacatatatagtgtatatatatgtgtgtatatatatatatgtgtatatatatgagagatgtttttctgtgtcacaattaggtattctgtattccctttcttactaagttcttgggccaacagcaagcttaaccaggtcttaccaatgggaacaatcatggcaaaacttaaagtctaagagcagggaagtttaatgtgtactcaatactttttgaatggctgaataaatgactgaattttcacagaaagttgacacgtctaaaaaaagaaatatatttttaagaaaaataacccatttatactatagaaatcaaaattatcttatgtgctttatcagtgataacaccattattaaagcagcagtatactaaaccatgtgtatatattttctgtgtaattttacaactatgagaatacatcctaaaattagttaacacatttaaaagggggaaatttaattttattaggtctagaggatcattatagaatttaccctaatggcttaaaaaagttaaaatatttcacctacacttaaatctttttgtgtactcagaagatttcagcccaattgatcatgtttcacttcaagaaatccttataaataaactttaatcccataggacagatccattaattatgctttcaggggaggcataattaatggatctgtactatggaattatagcattcagtaaatattaataatgaaaactcattctaccaagcaccttaatagtacccaaacaaatagatcattttatatggctgaagctttccttcagcattcccatatggaacatgaaagtatgcaaaacaatttaacatcagcttttctgggagaacttaatagattaaagattctctgatggagagattttgcatctcaataaaatgatctgtcaaaatttactttgatgaaagttttaaaagctctgataaaaactcagaggctatgagtaaataactattatgtattataacaataaatagcctggttatattgctaatgaagaatttttaaaataaacttttaattggggaatagttttatatttacagaaaatatgcagagacagtacagacgagtcccataaactcctgagtttctcctactgttatcatccaacctcagcagagtacatttctcacaacttaaaaaaccatcattggtgcattactattaactcaactggtcaatgtatttggattttaacagttttccttaatgtcctttttgttattcccgagtcacattcaggatactttattacagggctcctcaacttcctggccacggaccactggtccgtggcctgttggaactgagccacactgcaggaggtgagcggagggcgagtgagctaagcttcagctgtgcttacagctgctccgcatcattgccattaccaactgagctccacctgcctttcagatcagctgcggcattagagacccttaggagcgctaaccctagtgtgaactgcgcatgcgaggtttgaatgctccttatgagrttctaatgcctgatgctgtgtcacattctcccatccctcccaagatgggacatctagttgcaggaaaacaggatcagggctcctactgattccacattatggtgagttgtataattatttgattatatgttacaatgtagtaataatagaaataacgtgcacaataaatgtacttgaatcatccctaaatcatccccctcccactttgtggaaaaattgttttccatgaaaacggtccctcatgccaaaaaggttgaagaccattgctttattattgttgttcgccatgctttctcagtgaaagtttctcacacttttcttgttaagcactgattaggtttttgcagaacattcctcagtttagatttgtctgatatttttctcatgattagactgtggccattggtttgagggtagaagaccatagatgtgaaggatccctctcttcacattatacaacgttcatgctgtctacataatgctacccttgatcacttggttgaggtagtgtgtgctgggtttctccactgtaaagttacattttccttttttcatacattacactttggaagaaagtcattcagtgtagcctgagggtgggaatagggtgttaagtttcatctcttgaagagaactagctaaatgaattatttggaattcttctgaaaaaggatttgtctcgtctatttatttgttgatttggaatttttctgaaaaaaatgggtctcttctcccgatttatttgctcattcttttaatactttgagttatactctgtagtatgttttttatgttgttgttcgaattgttccagctttggcatttgggagttctttcgtgttgagttctttgttctttgtctctttggcatacccctgttcttttgttttttgagtacttccttgctttatggtaccacaggatgctccagaatcatcttgtgcctcttgtaaatttcttgtcccattctggacttggaattagccatttctcctaggagccctggtttgttttttagaaaaaaaaaattaaaaaaaaacacaagacctaggcactgggtgttagtaaggatattttatttaataaaattaccacattttccacagaatcagaagaaaaacataagacttatacaataaaatatttataatacttgtaaaagattctttcattttcatggattaaaaattaactccctaacttatgaatcagttaactgtatttcaaaaataaatttaaattttaaattttatattttgtttgtttgtttttgcatttgcaagatttaatagagtgaaaacggagctcccatacaaagggaggggatccaaagagggtaacctaaattttatattgttagatacacacggctgacttggaaattgtatatacagaacattgacagtactaagtgacaaatagtttgtgaatcaattgagagttcttcctttcttcatatcaaaatgaagaagataatactatgtttcccaatgctattaaaatgagtacatgtttgtatttatcaataataaatataatagtagcagttatgagaagatgtaacactcaaaatatcaactttattttctgattattaatagtgcctcttattcttcaatttctctgcttttttagtgacagaatattgagtgaggaatgaaatcgcttgtcaattaaggaaattgtcttctaaaaacaacagcaataaagaaatgaaagagttttttaataattaggcaagtagaaaggattctagagagcaatattcataaaaagaaggtgatattaaccagaatatttataatatgctcagtaaattcttgtctagattttattattgaacctaaggatgacacttaggagaaaaatgaaagagaacatagtctacattaaatagaaatagaaagggagaggtgaccaatttgtgcaaaataacattttaatggtaggtaaaatgttaggttcatattatttatctgtgctagtgtttgaaagaagcagtttgtctgttggacttacaaccaaaaaccaggttaagaacacttgttagaataggcttcttatgacaggaatgtctattgtgtctccaatggattaaaaaaaaattcatgagaattaaggagatttattctgttgagatatttgctgcttttagaaaatagctcttctatgttcccataggattcactttcacattattatgaaccaatcacttgtaaaatctctgaaatatatcaaaagcagatgaagccataattctgacagaacattttatgaagaaagttgtggattaacaaaaaccattagcttttaaaaacatcaaatgtaacttaagtattttatttagatattaaattgtatcagtattgctattgttgaatgaaagagtaaatggattaaaatatgaaatatggataagacttatcttcaaaaggtttacgatactatttgatctaaaagaataagcaaattggaatgatacctaaatkacagatcactgaaaagcaaatgggaaaacaataggataaacatgaaaatatgtatttctcaacttgataactaagtacagtttatcagctgttgtcatacgagattgatttgtttttttaaaatatttatctcaatatttcctcagaacagtaaaattaaggtgtcacactttaagattgatttgaaaattatagctagaacacaattttctcttagaatgacattcaaagaatcagtgttacataatgtaaaatttggagtctgctttttactaccctttgatttatatgttaatttctggaaagttgtgggagacctcaatctttaaagtttaccatgaaccttgactttgcactcctcatgttcttataaaaattaaaccttcattggaaagactgtgatccaggcttttcaatttttacaaatgaatgtcatctatgtctcctaaatatatagtttttgagggtatgatactttaataagctatgcaggctgtccatactacaggtaaatatcgaataattcaactatgaacgaactgtgttctgtcacttgcttaaattcttgtgagaaatccaactttaagagatttagctcaagagtctttttttctgtgtttttcagcataaagcttcattcatgtcttacgttaacatcctgaggtaaattagttagcaataccagccttgtttctctattatgtcatataatcagagagcgagagtcagcaattcataatatttcctggattgatcaaataaatggcatagaactccggataaattttgaaattaaagtcaataactaactcacttcaattatctggtgcatgtattttcctacttcctttagtagattattgttcaatttttacctaatttccttctttagatatttttactcaatgcactgccttatatcaatttccaaaataggtgtggtatgtgttaaattaacattatgctgaatatcttggttcctgtgtttatagttcttatccttggtttctggactagggagtcataagtagtcccaacttaatggatatttaaaatatgtccagtttattgtacatttgaatacagtgaattgaaaataatccttgaatagaaagtctctaagaataagtagcggttgtagcacctatgctttgaatgcgttcttttgttgaaacttaagtgagtcaaacttgcctacttatatccttatctcacttgaggtgaattcattctttggttttaatcttcactgcaaaatttctgtgtgtttgcacatatatttagaaaccaagctgaaaatgtaggtatatattcttttcaatgttttcttttgttttatttgcatatgggagaatccctctgagagactgtgttaagaatataataaaatgacttctgttgctacctactattagtatatttttcttgcttttagaaaagtaaattaatgatgaacttctaactgatatatctttcttaggctaatctctcattaaagacgttttaattgattttatttttaaaagactagataaacagccattagcaacattccaggcattctcttacatttgtgtaaatcttttatccttaaatttttgtttagcagaataaaagaaaggtaaaatgtcaggggctatgaatttaggaatttaaaaaatttaatattttttcagtttgtaattgtatattatggcagattggtttacataatgaaaaaaatggttgcaatgatttaaatctttatagaagaaaaactgtaatacacgtttgaaaatcagtctgaaatacattgaaatagcaacataatgaattattacagatacagtttaatttaaaaaaggtaaaatataaattaagcaatgatgataataaataccaccctaacacaaaaaatggccattatatttgataaaatgcacttaaaatatacatggagagtgataatttgactaatttcccagataatcatttctgtataaggaatgatttattatataattatgattaaatctacgttaaatctgattttttacattcatattttacttattatttgtttattttaatgatttatttatttttctaaattatgaatagtcaaaatgactacaaaacaatcctaattaaattcaatttcactgtccttgcagagtgcagacatgagtccagcaagcagtaccacgtcacttcctgttagtcctcttactgaagagccagtgcctttcaaggtaaaaaacaaacaagaaagcattatttataaaaatattaggatagttaataaatagtttaaaatagtttatgtgtagatggtgaagtgaactgctttaatcttcaagggtctgatttcaaatcttaaaatcgtttttttgtgtgttccattgtcattctattgctaactaaaggtaaaggtttgaatgataattaatactttatgggacaattgtttgtcttacatgtaaatggtggagttttattgtaataggttgattcacatgaattagaggttttaaatattttgtttatagtaattatattaatataagtcataggggaaaaaggaaacattcagccctcatctagtggttaaattttcattagcaatgctaggttaccaataattaatgatgtaatccttttaaaataagagtcaaaatcaagagttgaaatatggaatcattccaccaaacatattgtatttaataaatattggagtaaatatgcaaataagtatgtggtatgactggtggcatttttttcactttgggaagctatatacataacaaatacgaagtcttgttttgccacttaagattagatgtttctatttaagccaaagcttgtagatcaactattttatgtttgtactggggtatttagatattattaggattattataaataaaaacaattcttaagagcctgaggaaaaaaacttaaaacgttgggatgatgtacttaagtgcactgatttcagtatagtttggtttaaagacgtgcacattttaagattatcacttttatgactgcaatattttaacatacaattattatgagagttttttatttttcatataaggaatgtatcttattcaattttatattgcttatacctagtacagttgctggcatggattttcatatattcaatattgctgtcttgttgaaatgataattatagaaggctatgaattcaaatgagagtatttagttttctaattatggacacttttttgcttaatgagagtcaaatatttgttagaaggccctttctatacctgctaattgttaaatactgaatgatattctgattacattatttattgaaacattttctttattattatacagataaatgagaaaataatactaatgctacaaagtttgatgttaccgttttatggtatatggaacaaatttactgaagaagcatatctttaacaagattttaattgaattctcaaaacttcgccagaaaccattttttctttttaatattttgacaatgattacagtctttgaaaattaatgtattttttaacagaggttaaaaaaggttagacatatttcagaatctgctgacataaagctaatataaatataattagtttctctaactggttctgagagatcaatagttttggggtaaatgtaaatggttctataagaaattaaaactttcaagtgcttataatatttagtattgtcttttgatggccaacatagttatagtgacttttaatttactccttttgtgaaaggaatattgcctatatcttttcaaaatatttaatcacctataaaattatcccactagtgtttataagtatctaaacttaaaaatcaaaattatgaaataaaactttatctgcttctttcatttttagcttataaattgtcattgtgtaaatgagtaatataatacttaatgttacataaacacaaaatatacagaactattttgaacagaatcttaacagtataaagcattgtaattccaaggatatgttgagaattatataacaaatagaagacatttaagttttcttataaccacattctgaaaaagtctaatattataattcagatgtataaaactttgattaaaattatgatatctgaatagctaggtaactagaaaataaaaggttgtctttttcacctattccccatgaatgtgacatgatatttcatgttagtattagattaatcctcttaacctcttagcttacttttctaagatacagtgatttcagcactcaaccccatcacaatccaccctaacattagaagagcaaagcttcttctaatattggtgggtgattgagggatttgattttcctttttcttctgggaagtaattagattactagaagaaatgtatttactccactttcttagtcagttttggaagcactcagaacagttggaggaagataccttgttttggctggtatgtttatcaaggtgcatacttttttttaagcattacctttagaatgacattcagattaagttgaattcaaccacatcatttgaaataaagacaaatggtaaattatttttataaaaaataaatacaaatactttcccactaatacccatgcctttattcttgaatgttagataagaaattggctattgttaggaatgtaccatagtaagatatattaaattaagtatggaaaaaaagatggcatcctagggactatcccaaggtaggttaaactttagagatacatgaatttaaaatggcagttcagtcttgtttgggatcaaatgtttattttttccaatatggcagcatttttcaactttgttagtattggagcccattctttcaattaattaaaaacgatctgccctgaaagatagtctaagccccacatacatactcacttctctattcccccacactatggttcagttcctgctaatctcaaatttactgtttaaaaaccattgctagagtggtttgattggtgtagctagcctttcaaaactgaggacatttcacacaaaaattcatccaactttgtcttaaacaattgaaaaatctggaaactttgtggatctcgttgtaagtagaactacttgataagagatgagaaggctttctccatctagacagggtacataaactccaggtcaccacagtcatcaccattcctactatattcatgccaggtgatgaatgcatttgactgtattctttcatagaagatagtgtataattcacaatcttccacatatactacacataataaactccagatttcctgggcagcctcttgatactgaggagtttctaggatgcttggttcaaaaagtttcttttataagaactgtcagattcttttacctttataaactattgttatgggcatctatttggaaacaaaaggcaaatgtataacctctagtttttgttgttttttaatrgaatattcagcattatatcaactgtacacacatatggtctgacacatgccactgcatcattatagaagagccaaaggataaccaattttgcataggtaggaacaaaatgttatcaaacatcaacaacagaatcataaaagttcaagatcattaaagtgaaacattgctctgataaaagacagtggattgcttagccattaagttttttatagttttctgargactaaacctgaacaaaattgatgttgttaattttaatgtgctcattctatccttttctrycttttccctctggcattctccctgatttcttgcaaacatctaatcacttcctatctcatctgcctgacatctccctttgttagccttggtaaaatgctccacactgaagatggcttcaagccactacatttcactgttctttagtaggatgaccctttcaatgttttgtacatatgcagttattagcagcctcagtccattcctggaactaacactcttgaagctaaagctggctcgttgctcctgaccctccataaaagtacaatttatcatgagccatgttctttttgctagtaatgttcatcagttttaaaatttatttgtacttcaatgaagcatgatggctacattttagtctcttttcctacttaagtaatattttttgattagatatgttaggaaatcatattatcctactgtactgtattatatttatcctgtgataaattcagcaggaaaaaaaaacttctattctattgttctttgaacttctgaagacttttgtagcttcaaaagtacacaaaggcattgaggaataccctccattcaccaatccttgatcaaaatttaaaacaaacctaattcattgcatttcttggcccattgactactgcttccctgggatgtttgcattcctggaatgcctagagggattgtcacagtacctggaatgcacaatggcaccaccctctccaaggtatggccacattcccaaggaactgacagtgtggcatttggttctttcctaggtctcttcttcttatgaaatccaaggttctctgacttcttttcctcatccctagttatttctctttagtctaaagaaactccaagcttctctcagagatgtttcttctctccttaaatcagccagggcactgataaaacaatatcaagaataagaacaagaaaaaactctttgatgtactttttaggaatagaattgtgtctgaagattcttctgccgtgacatgaacttaactttaatatgcacagagccactttgcttaagcaggggatagaagggaggaagtagataaataaattgtttcaaaaaatttttttgtaggctgggtgtagtggctcacccctctaattccagcactttgggaagctgaggcaggaggttcgcttgagctcaggaatttgagcccaaccttagcaatatagggagaccccctccctattatttaaaaacatatattctaccatgaaatactggtatgttaagcaataaaaatgatgcttaactttacgtgaccatagagcctggattcaggaattagtaatgtgtagtaacacacagtttgctccctattgtataaaatgaagtgtgtagaaaaaaagatgcagtaaatatagaattatcaatcttcaactctggggatggatcayactattttaagaaaaattttctgtagtttctataatgaccacttatttctatttttaaaacaatgtttatttttaataaagcagaaaagagaattgggggcattagaagcaatgcagtctaattaggaggctgtctgggaggatcaaaccccagttttgccactctctagctatgtgagaccttgagccagttattttgtgtccaaatatcttatttataaaatgacaacagcaactacttcttcattaggttcttataaggttaaacaagttaataaatgaaaagtgtctacaatagcacatagtaacccatatgtaactgttgattattatttttatagatgcaagatctccaagttcaatgcaagaaagtcttataaatactgtagggcagaaattttgccactgaactcctactactttattttcaaatatgaaagaaatatattttaaacataaattatttactttgatgaagattcaagtttaacatttattcctacaagtcatgctatttattttatacgcttgagtattcagttgagctcatatatcagattcctcttatgaaaaatgattaatggaaatgtttattaattttgagaaggagtaaatataatgaatttgtcttgagggaaaactggtaaatataatgaaacactacttggaaaaaatacataatagtttctgtaacaataagaacatatatatattggccgggcgcagtggctcacgcctgtaatcccagcactttgggaggctgaggcggttggatcacaaggtcaggggatcgagaccattctggctaacagggtgaaatcccgtctctactaaaaatacaaaaaaattagcctggcgtggttgtgggctcctgtagtcccagctactggggaggctgaggcaggagaatggcrtgaacccaggaggtggagcttgcagtgagcggagatagcaccactgcactccagcctgggctacagaccgagactccatctcaaaaaataaataaaaataaaataaaataaaataacaaaagaacatatagtatctttttatcaggcatacaccatagcaactttttcttttgttatccaaaccaccacagtaacgtaacctggtaacctcctaaaagcataccttccagtgaaggaatattatttaaccactttagaatactggggaaacacccattgtgaacaaagtgctgctgctgttttacttgtttatatattataacatcaacatagtgagtagtttcgatttatttcatctaaatatatcattatgtaaaagaatacatttggaaactctgaaagacagaagccaaattgtggcatgaccttcacaacatcatctgttgtgtatcctgcatagactcatttttgtgtgtgtatgagagagtttttattgttccttttcatttattgaatgtaatggtctctcttagtattagaaatcgcttttttaatgtatccctggaagagcccattatggtatatttctgcatttctggtcattttttactaagccatctatgcattcaaggatttgttgatgaatcaatttgtcaagtacctaccatgttcttagtaatattctaaggcattggtatgtcgatgtcaacaacacgaactaaatccctgcattaatggtgtttgggttcttgggagaagaaatagacaaccagcaaataaatatataaaatgtcaggtagggtgataaatgttatgatgaaaagtaaagcgcaatatgaaggatagaaagtggcactggagtgtgttggtgtttcaaaaaggatggctaaggaagaccactttgattatggaacattttagtagagaccataatgaagaaagggagaaagccactcatgtttttatgggaagaaacctgagaataacaactgcaaaagcaagagaatactcggtcttatcaggaatggcaaaacattgtgtttrgagtagaatgaatgatgagacaagtaatacaagtttaggtcacagagaaatcttatcataaaaggtctagtatgtcatgataaagacttaagatcttatttcacatatgatgaaaagccattagagtgtttgttgaaaaaaagaatgacataatcagactattgttaaactattgctttggtttctgtgtagatataggcattactgagtcaaggctcctatagttgaaagattatgatggcttaaactggagtggtaaaagttgaggggataacaattgattgaatattgagtacattttgaatgtggggtcagcaggatttgttaatatattgtatgtagaatatcctaaaagaacaaaatcaaagatagtttctgatactaattttttaatgttttcctatttttaccctttaggtaactttctgatgttacaaatagatagcatgatacggagattagtaaaatcttatttgtttggttggcttaattgtgttagtagtgaggcagtaattgtgaaatggcagacgatgttggttttgcaggggataatattcaatcctacaagtaatactaatttctggtaatatattttatctgccagataactgaaagcacataggtaaaactaaacataatttgtggtggatgctgataaatcaataattatggtttagaaatatgattcattaatacataggtgaagaaataagcaggtaaaaataaaattctttgagggatagctgatgaattttgaatataaaccatacaataggtatatatttgaggaaccaatgtattttataaaaatcattttaaataaacatggcatcattgtggttctctaatgggaataaattttaagagggttctattatttatactatgtatatttaaagcaattatttttgattgatgtaatacaaaatgatagtttcactcatataattccaagtaataaaccatctcaaaacctgtcagtctaaaataataatttattattgatgtttatgattctgtaggtcgactagactcatctgggcagttcttgtgtgaggttttaaagtgggtacagtcagactgaggttgagaatggggtcatctgaaggctcaggtgaggtagactcccaggataattcctttattcacaagtctggtgttgcactgaaaacactgtacctattgggatttctctctctctctctctctctctctctctctctcactgctctattctacttctgcctccctctttctctcctcagcctctccatggactagcttgagctttctcacaacatgctggttttggataattagacttgttatatgatagttggcttcccctagggtgaatgttccacaggaaaagaaagggaaacatgtcagtctaattaggactagaccagaaatacacagcttcacctccacattgttctattgatttagcagttccagagtgtgtcgacagtccctaagactacccctacattcagagatttgtaagaagacacagaattcaacagagatcacactcgcctctaccagcaatgtgaacagaggacatgtatgtgatatttctgcccagtaaaggccagtagcaactcagcaccaaaggattttactgggggcttatcatgtaggaaccctgtacctagtgtatatccatattctaaactcccagaagaaatcaggtatttaacataaacattattgtacaaatattgtttgtacaaactacttagggacagtgagccaatcttatcatttatggaaatctttatatgtatgtaggactctggttaccagtcagtcaagttcttagataccaaccagtggctaatcttgcaagtgggcctttctaagcactatatattaatttgttctctatctccatcagtttaattattgtaatatttagctcccataaataagaacatgtgtaattttcttactttccttggcatatttcacttaccataatgacttccagctccatccctgttgttacaaatgatagcatctaattcttttttatggctgaatagtgttcattgtgtatatgtatcacattttcttaatccattcatctgttgatagtcacttggattatttgcaaatcttgactgctacgaatagtgctacagtaaacatgggagtgcagatatctcttcaatacactaatttcccttcttttgggaatatatctagcagtgggattgctggatcaaatggtacatctatttttagtttcgtgaggaacctccaagttgtactgcatagtaattgtacaaatttacattcccaccaacattgtatgaaggttcccttctcttcacatcctccaaagcatttgttattttgcctgccttttggataaacatcattttaacaaggatgagatgatatctctttgtagttttgatttgcatttctctgatgattagtgatgttgagcaccttttgatatatgtgtttcccatttgtatatattctttagataaatgtctattcagatgttttggccatttttaaattgcattgttaattttttgtcctatagagttgtttgagctccttatatattcttatgttaatcccttgttcagtgggtggttttcaaacattttctcccgttctgtgagtttctcttcactttattgtttcctttgttgtgcaaaagctttttaacttgatatgatcccatctatccaattttgctttggttgactgtggtttagggatattaagaaatccttgtctactccatggtcctggagagtttccctagtgttttcttttagtaatttgatagttacgtcttatatttaagtctctaatccattttgacttgatattttgtatatgatcagagataggggtctagtttcattcttctgcatatggatatctaggttttctggcatcatttattaaagagattttcctttccccgatgcatgtctaggcacttttgtcaaaaatgagttttctgtatatgtatagatttgtttctgggttctctattctgtcccattggtctgtgtgtctgtttttatgctagtaccctgctgtcttgtgtactatagctctgtaatatgatttcaagtcaggtaatgtgattcctccaattttgttctttttgctcaggatagctttggctattctgggtcttttgtgattccaaatttataaattttaggattgtttttaatatttttgtgaaaaacrtcaatttaatctatagattgctatttttatttttatttttattaatttaatttaattaattaatttatttattttgagatggaatctcgctttgtcgcccaggctggagtgaagtggtgcaatctccggtcactgcaagctctgcctcctgggttcttgccattctcctgcctccgcctctcaagtagctgggactacaggctcccaccaccacgcccggctaattttttgtatttttagtagagacggggtttcactgcgttagccaggatggtctcgatctcctgacctcgtgatctgcccgccttggcctccctaatctgtagatttctttggatagtatggacattttaacaatattgattcttccaatttatgaatctagaatatcttttcatttttgtatcctcttcaatttattttatcagtgttttatrgttttcattgtagagagctttcatttatttggttaactcctaggtatttatttttgtttatagctattgtaaattggattactttcttgatattgcaattttcacaattttcaaatagattccgttgggatatagaaatgttaatgatttttgtatgttgatattgtatcctgcaactttactgaatttgtttttcaattctaataatttttttggtggagtctttaggtttttccacatataaggtcatatgacctgcaaacaagtataatgtggtttcttcctttccagtttggatggcttttatttctttcccttttctgattgctctagctaggacttccagcactatattgaataacagtggtgaaagggcatccttgttttgttccaaatcttagacgaaagactttcagattttccccatttagcataagctgtgggtctgtcatatatggcttatatggcttttattgttttgaggtatgtttcttctatactcagttttttagggtttttatcatgaaagagtgtggaattttatcaaatgctttttcagcatctattaaaataattatatgtttaktgcccttcattctgttgacatggcatgtcatattaattgatttttgtatgttaaaccaggcttgtatctgtagaatgaattctacctggtcatgacgaatgatctttttaatgggttgttgaatgcagtttgctagtgtgttgttgagtatatttgcatcaatgttcatgagggatattgtcctgtagttttctgttttggatgggtctttgtttagttttggtatcaaggtaatattggcctcatagaatgactttggaagtattttctcctcttccacttttcagaatagcttgaggaggattgatactagttcttcaaatgtttgctaaaattcagcagtgaagccactgggtcctgggcttttctttgcttggagatgttttattacagcttcaacttcattacttattattggtctgttcagattttacatttcttcatggttcagtcttgatagattttatgtgtctcaaaatttatccatttcttctacattttctaatttattggcacatagttgctcatggtaactttaaatttatgtagtatcagttataatgtctcctttttcatctctgattttattggtatgggctttctctctgttttcttagtctggctaaaggtttattgatctgtattatttattttactaattttggttttgattgttcttttctagttctttaaaatgcattgttaggttgtttatttgaagtgtttctacttttttgaaataggtgcttataactataaatttccctcttagaaatgctttcactatagctcataggtttgggtatgttgtgttttcatgttcattggtttcaagcaatttttaaatttttttcttattttaatcattgagccactgatcactcagaagcatattgtttaattccatgaatttgtacagtttccaaaattcattgtgttgttgatttttcattttattctattgtggtcaaagaagataattgatataatctcatttaaacaaaattgtaagacttgttctgtggcctaacatatggtctatccttgagagttattcatgtgctgaggagaataatgtgtattctgaagcctttggatgaaaaatgttctgtaaatatctgttaggtccatttggcctgttgtccagattaagtccaatgtttctttgttgattttctgtctggatgatctgtccaatgctgaatgtggggtgttgaagtccccaagtattattgtattggagtcaatctctctctttagctctaataatatttactttataaatctgggtgctcttgtgttgggtgtgtatatatttacaatattgtatcctcttgctgaattgacctctttatcattatataatgaccttctttgtgtctttctatatttttagtcttgaaatctaccttttctgatataagtatagctagtcctgctcttgtttccatttgcaaggaatatctttttccatccctttattttcagtctatatttgtttttacaggtgaaatgtgtttcttgtaggaaacagattattaggtcattttttttatccattcagccactctatgactttcaattggagagtttatttcatttacattcaatgatattattaataagtaaggacttactcctacttactcctattttgttttctggttgttttttccttctttcctcccttgctattttcttttgtgtgaaggtaattttctctggtggtatgttctgatttcttgctttttatttttctttatctgctgtgggttttttgatatgaggttatcatgagatttgcaagtaacaacttataacccatttttttaaaaaataggtttaaaatgcaatgacaacatggattgcatgaacaaacaaacaagtacagagaaaactattaaaaaccctacactttaacttcatcctccaactttttaactttttactgtttgcatttatatcttatactaactatgtcttgaaaagttgttctagctattatttttgttacattcatcttttagtttttctacccaagttatgagtttatgtaccatagttacggtgttataatattctgtggttttctgtgtacttactattgccagtgagttttgtaacttcaagtgatttcttattgctcattaacatccttttctttcagattgaagaattctctttctttagcatttcttgtaggacaggtttggtgttaacaaaatccctcgtcttttgtttgactgagaacatctttatttctcctttatatatgaggatatctttgctggataaactattctaggatataggttttattccttcagcactctaaatatgtaatgccattatttcctggcctgtaaggtttccactgaaaaggctgctgccatatgaataggagctccattgtatgttgttcctttcttcttgctgctttttaggatcctttctttatccttgtccttttttagtttaattattaaatgtcttgagatagtcttctttgggttaaacctgcttggtgttctataaattttaggtacttaaatatttatatctttgtctaggtttgggaagtactatgttattgtccataccttaatttgtctctctacttcttctttaaggccaataatgcttagatttgccccatttagactattttctagattttgtaggtgtgcttcattctttttactttttatctcccctgactatgtattttcaaatagcctgtcttcaggcttattacttttttattctccttgatcagttcttctgagactctgatctgttcttcagtatttcaattgtatttttcagctctagaatttctgcttgattctttttaattatttccatctatttgttaaatttatgtgataggttctgattcctttccctttgttatcttgaatttcattgagtttccacaaaataactattttgaattctctgtttgaaagatcacatatctctgtttctcttcagcattggccactggagccatatttagtttctttggtgaggtcatgttttcctagatggtcttgatgcttgtggatattcatcagggtctggtgtctgggtattgaagagttaggtatttattgtagtctttgcagtctgggcttgtttttgaacccatccttcttaggaaggctttccaggtattcaaagggactttggtgctgtgatctaagtctttggtcactgcagccatatctgcattagaggacaccccaagctgagtaatgctgtcatcttgcagactcataggggtactgccttggttcttggctagggtcaggcgaatttttttttgctttaccatacagagattcttgttgttttctcttactttcccccaaacatagtctctcccactattttgggttgtcaagagctggggaagtgtgatacaagcacccctgttgccacctcactgggaccaagttgcattcaacccaaagccaacacagcactgtgtcttcccaaggcccactgtgacctcccaaggcccactatgaccaatgcctggctatcacctgtgttcactcaagaccaaaggctctacaatcagcatttggtgaatccagccaggcttgttttcttcccttcacggcactgagtttctctctccctgtagccaacactaccccaggcctagggtgagcaatgcctggctgctgtcgatgttcactcaaggccctgtgctctttcatcagcttatggtgaatgctcttgtcctgagtctctcctttcagagaagtgggctcctgtctggcccagggcaggtccagaaatgccatccaggagccagtgcctggaattcaggaccccaggagcttgtttgttgctcttccccactatggtggaactggtacaagcttcagtaaaaagtcccattttttccttcctctcttcttctaagcaggagactctacccatagccaccacagctgtgaatgtgctgggtcacacctgaagccagcatagctctgagtctcactcaaggcaagtggcaagtactgcctgcctgctactgctcattatttagagcccaagggctgtttagtcagcaggttatgcatcctgccaggactgggtccttccctttagggcagtgggttccctttggcccatggtatatctggagttgtcatccaggagctaggacctgaaaggggggcctcaggtctctgcctgttgccctattctattgtggctgttccaatacccaagttggaagacaaactcctctttactttccccctcctctccttaagcagagagaagtctctcccagagctgcaagctgtgctacctggagttgggggaggggtgatgcagaaactcccttggctgccccagcttgtgtctcattgggtcaygtgcatcttagcttcatgggctccaagtttagcaccaggacttgcccaggaattgcagtccttrtgggctagactgcatttcaagtttatttagtacccccaagctctttagcctgtggtagtggggcttactggaattcaggttccaattgctgggatgagtaattcacctctggctagggctaatctgaatgytccctccatgtcaccaactgagctctgccctgagtcactttccactgtgaccaggcagcactgtgttccaatgctaagttccacaattagtgcactgtacctccttgaagcacacagattctctctccacggcaggtggctgactactgctaggaataggggaagggtggtgtaggtaattcaaaactgtctttcttatcctcttcagtgcctctttactcgatatgatgttaaaaccaggtactgtaattacttacatgagttttggttcctatgaaggtgcttttttgtgtggacagttgttcaatttgttgttcctggttggggggaatgatttctggaggcttctattcagccatattgctccgccttcgtcactatatccctcaatgctattttaatttccgttaagtttggaaatttccattaaatgtcaccatatttaaattaacttcaaagaattatgttttttaaaagtattttacaaaataatggataaaaacactaaaagtaaattctaaattgagatatcaactaccaaacaagactttatatatatgtttatatattattatttggtgtcaatatttttttctcttggttcagtcaagataaatttagaataaatagtatacctattatttgactattgcagacagcattactgatggatgatgaatgctcacatagtaagaaaaatgagaattatatcctggtaagacaaataaaattatttttacataaattaaagtcaaaatgaattttgcttaatttgtgttaaaagatatgcaatatctcttagacatagtagacctctgggaaaaatatttcaagaggaaaacattagcaaatactttcatgttgtctattagcatcatattgctgttcaaattattctcacacactgtccraatcatttcagaaaggttggtacaagataaagaacttgtcaacattaatacatactaaaaataatggcatacctcttcttccttctacagttcacacattcattttctgtcttaaatttaaatttcaattagtttttcattttttccaggttggtgtcttggatttctcctgttttggggttctttaagtagtactgatagaaaattttctttgtaaaatggcttattttaccatgccttcagatattgggtcatagtctgttttgcttactttaatcaaaggattcatttaagaaattttgtggacaccattttctgagcatctattaaaatattatcttggactattgaatttaaggtttcactttgtgtatcactgagttaaacagggccctggaaatctgaaggatatatacatttggattgctttccttaattggccaaagtgaggattctgtaggataagcttgaatactgcggtagagttcaggtacagaacatgggaagagttctgaattaatttgtatgtaaaggataggtgttgaactactgctagcaaaattttatagccaataaagggcttaattataaggaaggaaaaaaatatttatatgtttcttcaaacaaaaagaattttaagaaactgagtcattataacctcaatcttggtttgagaatccacttcagagtagattggcatcactgaaacattttttctgtcaaaagatgccagggcagttttatttgaaaacagttgaaaccaacatgtattcagttggatggtgttctgttcctgaacacctgttgctctcaataatttgaaaaaccttggtgtgagataatagcagaggtaacaatcacaccatcattcttgtgcacaccaatattaaggttttaaaatacgtgatatatacatcagatactgaatctggctgggaattcacactgttatatttttgatataatatcattatcaatgataatttaagcaactgatctcatgtatagcacttcagtgtttatttcttacttagtattatcatttcatataaactccattatactcatttttattgttttttacataatttcaaatattacttcacagtttacctataagtgtgaacacgttttttaaaataagaagttagtaacccaggtgaaattcaaagactatgatttactactaatgtgctcatttgagatagaccgtgaatatgagaagctatcatatatggattcagcatgagttcagtttatctggcaatagttccatctgttgtattttgaaattgcctactgtattagttcattctcacactgctttaaagaactacctgagactgagtaatttataaaggaaataggtttaattgactcatagttccatagaccatacaggaggcatgcctagataggcctcaggaaacttaaaatcatggcataagggtgaaggggaagcaagtatgtcttcaaatggcagaaggagagggagacagagagagagagagagagaaaagggggaagtgctacacacttccgagcaaccagattttgagagaactctgtcacgagaacagcagatggaagtctgtccccatgattgaatcactctcccaccaggctccttctccagcactggcaattacaattcaacatgagatttgggtggggaaacagagccaaaccatatcatctacttaaataaccattgaattttagaggttgaatcatatcaatatgcatgctatagactgaagatttatgttctctgaaaattcaccttgagatttttacctccaatgtgacaatattaggaagtcgagcctattactatgattaggtcctcagtataaagcccttatgaatgttattagtgcccttataaaacaggtctcagaaaatgctctcatcccttccaacatgtgagcactcagagggaagattgctgtctgtgaaccagaaagccctcactagcccctgaatctgctgacaccttgattttggacttcccagcctctagaattgaaaaaaataactttcaattgtttagaagccacccagttaatggtaccatgttgtatcaaataaaatgtaataaggaattaaatgcaattaattttgccatgcatgaaattctttggaaatgactgttttccttggtgactctatagtgctaaaataatattagacttaagtgttttataatgatattgggcttatgttgttattttttgtttcgtaaaatgtgtaattcaactactgtttttattktacyatgtggatgcattaagtagccatgctgacagatgcaataaaatgagtaaaataaacaaatattttgatttttttaagatataaatttagcctttttttcactgcagttttcataccacacataagtaatttggcagatattctattatttattgttatttccttaggaaaaattggcatgttgatggcacaaattaaaatttggataataattaggagtaaataagataattcaatttggtcttgcctacaataaagatattctcaatagcttaggaatataatgaataccactttaaaatgcattccaaaagaaagaaggaaaggtacaatgtgttttagcagaaacttacttgtgtccctttggttagtggctgatacatagcacagaaattagaaggtaaacaattgccagatgaaaggattaaattataactaatagcaaaaattttgaagatagatataatttgaatattctgagaaactgttgatgtcagattctcagctaaggaaattatctgctttgaagctcttcagttatattattagcagtcrgtttatgtctttgtacatgaacacgtcttctttttctcacatagtttattttactttagtaaatctgatgggaagccttatgtcagaatatgtaacaaacattgattcttgtaggctaaacttattttattaaaattatgttgcatatgcttcttattaagaataaaggtttatttagactagttaggacctgcttaacaagaaagacttcggcagccacctttaagcctgaagctttaaaaatgctgagcaaaattgtcaaagcataattaagggtaggggaattargttcacttttctcccctaagtgtctttgccagagacagaaacttcaacaatagagctaagtggaaaaatggagccatgtcagttaccacaccatgctaaagactgattagtcataatttttggtaataatgcccacaggaataaacctgacaatggtgtactctcttgttagcattagcccttttttgtccccatttttcttgctctttcccatgggcctggtcacttagtgatattagttttaaaagtttcatttctcaccatttctgctactttcttgaatgtggtgagtcatgcagaacaattaacaagcattaattgaggttctcttatgcataagattttatgtaaaggtactgggggctgggaatattttcttatgactatggaaagctatgggaatagtgacactggttgtatttgcacacggcctggaaaagtgcaaagtattgggagttgaggagagacaaatgtcctgaaatctcagctgaaagagcagaggccttgtgctagaccctgagggtacagaaactatacgtattcggttatgtgttgcctgtatgatgaggaaaaacttagactccattttacaggaagtaaggtaccggaagtggtcaaaaattgagcaagtaataaaatgcaaaatgaagaatattttctacttcttgagtttgaattccacagaatgagttttggactttatttgaaatttgtcaattgctagaatatcaagaggcactgatcaaataaaaattattttaaaaatgaatacttcttatataatacactattgttggatacctatatctgcatatgctctaactaggatgaaaattacctatattcatattaaaataatagactttacagatgatctagaccaggggtccacaaccatcaggccacagaccaataggaaccagtcacaaagcaggagatgaccgatgggcaagcaggcattaccacctgagctctgcctccagtcagatcagtggagacattagattctcatatgagtgcaaaccctattgtgaactgcacgtacaagggatctaggttgtgtgatcctatgagaatctaacctaatgcctagtgatctgaggtggaatagtttcatcctgaaacaagtcccctatccatggaaaaattgtcttccatgaaaccaattgttggtgccaaaaaggttggactagtgatctagactatcgtaaatatgtactaaaaattcatacattttatatatattatatatatatatgtactgctatatcttaaaaagttatagtttattagtttcatattgctgctgtaacaaatgaccacaaactcggtggcttaaaacagcacacatttagtatcttaacaactctggaagtcagaagtcagcaatgggtctcatggaaagaaaatcaatatgatggcctggtcgagttctttctgaaggctataagggacagtttgtttacttaccttttgaacttctagaagctgcctgcattactgggctttgtagaccccgtctatcttcaaaaccagcaatggcctatctcaagtcttcctcatgctgcatctctctgattctgagtcatcttctgtctcccatttttgacatttaaggaactttgtgattcactgggtccacccagatagtccaggaaaattctattacaaggttggctgattagtcaccttaatttcatctgattctttcattcccctttgccatggatatctgtcgaatggggcgggaagcgttattctgcctgtcacagtcagtaatatcacacaagtaagatcaggattttatttcttaccaagtaacttttgttctgtccataaatattgagctgcttgtgtaagtatttgcaatgcacatyacttttccccctcagtggttgattgttatattaatacagagaaaggaatttccattgtgctgaattacacaagctatttcttttatctttttttttttttttttttttttttttttgagacggagtcttgctctgccacccaggctggagtgcggtggcgtgatctcggctcactgcaagctccgcctcctgggctcacgccattctcctgcctcaggctcccgagtagctgggactacaggcgcccgccaccacacccagctaaattttttttaattttttttttctttagtagagacggggtttcaccgtgttagccaggatggccttgatctcctgacctcgtgatctgcccgcctcggcctcccaaagtgctggggttacaggcgtgagccaccacgcccggcctcttttatctttggtatatgtttccaactcctatgcctagaaaacttgtactttccatttagtgcccaattcaatgccatctcctctacaagaattcctccctgaagcctcaaagtagtttaatcaaacttctaatatggaaccataaaattatattgtaattatgtttatttacaatttcttccaatagatgcaaatgttcttaaaggcagatatattttatattctttatattccctatttcagttcctagtatagaaccagtacatagtatactgttaatagatgaatgagtaaattgttaaatgaattaatgatgaaaaaaattcacttaagacctctcatttcctctcaaatattttatcctatcttacagtagtgatttaataaaatatccatttaataaaattarccattgggaacttaaataatacaacaaatcctatcaagctatacacataatatcagcctaccaagttttctataacttatcctcttttttctctaccagtgtcagcatagctcagcctatcctaggtccgaattcattttgagactctaacttggtgtagggaattcagtgtcagattgtctttttctttgtcaggatcttgtcctccattctaaaaacctggctgctgccttagctggtatttatctgataatcagtgtctgagataactgcatttctgttaactgcctatttgggtttataaatattatctttttcaagatcttccataaccaagcactgaaagttttaggtactgaaaactgtctgtttgcttagattattcattcttaatacaccagactattgtcttactttacagataaggaatttgaagcttagaatagttaagtatcctgactgcaggttgcaatgctggtaaatgaccaaaatggcatttcaactcaggtcctaaaaattctgaagacttgttttaactactgtactctactgttttaactactgtactattttattttaagcattattctgactatccatttgcttgatataactgaggagtggtaaagatcaaagtagaggaagaggcagaggtagagagaagagaaaaggagggtaagggaggagatgggagacagaaaataaaaaaagaaaagaaaagagagaaaaactatgagaaaacatcccactattaggttgggcatgtattgagatcataatcctaacaaggttatgcatttcttttattaacaaacttaataatttcgagccatctttgcagttctagaatgaaagttacctgaaataatggtcagttttcctagatgcaggcaaaataatttgacttagtttaaacagaaaggattttattatagaatatttgatagcttacaaaatttcttggaggtcagcaaatcaaaatttcttggaaagtcagcaaactatagcaacaaaataccagacaagatttctgcctggaggggataaactgcggagctaggctgagagcagagaaaaaaaaagagaggtggaggggaagggatggggttatggaattttcagtgtttagtatgcagagtttaatttaatctacctgttttcagtaggatattctctttctcggttttgcctgatgtttcttcaatttggagcttatctaattttcttttttttttctttttttaaattttattattatactttaagttttagggtacatatgcacgatgtgcaggttagttacatatgtatacatgtgacatgctggtgcgctgcacccagtaactcatcatctagcattaggtatatctcccagtgctatccctcccccctccccccactccacaacagtccccagagtgtgatgttccccttcctgtgtccatgtgttctcattgttcaattcccacctatgagtgagaatatgccatgtttggttttttgttcttgcagtagtttactgagaatgatgatttccaatttcatccatgtacctacaaagacatgaactcatcatttttttatggctgcatagtattccatggtgtatatgtgccacattttcttcttttttttttattatactttaagttttagggtacatgtgcacattgtgcaggttagttacatatgtatacatgtgccatgctggtgcgctgcacccactaactcgtcatctagcattaggtatatctcccgatgctatccctcccccctccccccaccccacaatagtccccagagtgtgatattccccttcctgtgtccatgtgatctcattgttcaattcccacctatgagtgagaatatgcggtgttgggttttttgttcttgcaatagtttactgagaatgatgatttccagtttcatccatgtccctacaaaggacatgaactcatcattttttatggctgcatagtattccatggcgtatatgtgccacattttcttaatccagtctatcattgttggacatttgggttggttccaagtctttgctattgtgaataatgccacaataaacatacgtgtgcatgtgtctttatagcagcacgatttatagtcctttgggtatatacccagtaatgggatggctgagtcaaatggtatttccagttctagatccctgaggaatcgccacactgacttccacaatggttgaactagtttacagtcccaccaacagtgtaaaagtgttcctatttctccacatcctctccagcacctgttgtttcctgactttttaatgattgccattctaactggtgtgagatggtatctcattgtggttttgatgtgcatttctctgatggccagtgatgatgagcattttttcatgtgttttttggctgcataaatgtcttcttttgagaagtgtctgttcatgtcctttgcccacttttttatggggttgtttgtttttttcttgtaaatttgtttaagttaattgtagattctggatattagccctttgtcagatgagtaggttgcgaaaattttctcccattttgtaggttgcctgttcactctgatggtagtttcttttgctgtgcagaagctctttagtttaattagatcccatttgtcaattttggcttttgttgccgttgcttttggtgttttagacatgaagtccttgcgcatgcctatgtcctgaatggtaatgcctaggttttcttctagggtttttatggttttaggtctaacgtttaagtctttaatccatcttgaattgatttttgtataaggtgtaaggaagggatccagtttcagctttctacatgtggctagccagttttcccagcaccatttattaaataggaaatcctttccccattgcttgtttttctcaggtttgtcaaagatcagatagttgtagatatgcggcgttatttctgagggctctgttctgttccattgatctatatctctgttttggtaccagtaccatgctgttttggttactgtagccttgtagtatagtctgaagtcaggtagcgtgatgcctctagctttgttcttttggcttaggattgacttggctatgcgggctcttttttggttccatatgaactttaaagtagttttttccaattctgtgaacaaagtcattggtagcttgatggggatgacattgaatctgtaaattaccttgggcagtatggccattttcacgatattgattcttcctaccccacattttgttaatccagtctatcattgttggacatttgggttggttccaagtctttgctattgtgaatagtgccacagtaaacatacgtgtgcatgtgtctttatagcagcatgatttacagtcctttgggtatatacccagtaatgggatggctgggtcaaatggtatttctagttctagatccctgaggaatcgccacactgacttccacaatggttgaactagtttacagtcccaccaacagtgtaaaagtgttcctatttctcgacatcctctccagcacctgttgtttcctgactttttaatgattgccattctaactggtgtgagatgatatctcattgtggtgttgatttgtatttctctgatggccagtgatggtgagyattttttcatgtgttttttggctgcataaatgtcttcttttgagaagtgtctgttcatgtccttcgcccactttttgatggggttgtttgtttttttcttgtaaatttgkttgagttcgttgtagattctggatattagccctttgtcagatgagtaggttgcgaaaattttctcccattttktgggttgcctgttcrctctgatggtagtttcttttgctgtgcagaagctctttagtttaattagatcccatttgtctttctgtagagaataaactcctagtctgctagggacggaaggagaagttgcttgggtgcatggagtacttttagctaaccctctagttgccagccccatctttactcccactttgttaggtgcacagcttttctaaggtcccagagtaaatgtggggttgtttgagggcaaggaggtacactgctggctcaggtttcagatttcttgagactatttgctttccagtgtatgcgtttattttttcttcagctgctgccagctctcaaagtgctcaaattttacagtgaacttatcttaaaatgctcctctctttatactttctgccgatatagagatatttagtattaatgttcatttttaaagaattttgaagaacaattctatgccaaaaccaagctgaatactgtacacatgatcataaaacatagtaaacagtatacattcaattttatatgaatattggtaaatggtgtctgtatctttgtagaaaggaccaaattgcagttagcattatgaattttcatttaactttttaattttcttgttacatagacactagtcattaagtgtttaagaagagatctgattaaataaattggaattatcttttctttgaaatatatcttaattaaaccctgtctattatgaaaatatcagacctttattagtaatcatttctatattatgctgaaaataactttttttaactctgcttaatttatttcatgaaaagatttaacgaaaggttcagtgaagttttgcaaaaattggtgcataaactcagatatgtaaagattcacatattctaaaattttctccttcagccaaatataaactacacatataaaaaagtaagacattgccataagccccatggtttaataacattgctccacagtcttatgagtttgttttaaagctttagtcaaaaaatacaggatgagatttgttaatatacacaaaatttagcttttcaatgtgttcatgttgagtaattaggttatgtgctacataaattaatacatttttatgtggtaaaaacagcgtaagtggtaacagctgcctctaaagtatctttgtkcttattcagatttaaattacctgttgatttgagtaagtaattataattttgtcctaacactgtgtaacatatggtgtttacattcttctcaagagctccttgagggaaaaaaagtacacagaaacatcaatataaatagtgatttaagaaaccaatgaaaaatatttacaaagattaattgtagttaataggatgttaaatagttgttaaagcatttgaatttgtcttattggattattgacttatgatattattttctattgtttgcttggtgttgacgttgttacataacatattcattttgagaaatctgttttccaaatggaagtttattcttttattatcatagaattcattttaagctatgtgttcctttttcttaacaacaaagcattattttacatctgtgtttatattttagacttagcatataagatattgataacctagcagactttttaaaaattaaaaagtataggatataagatttgttttaaaaccttttaagttataagtctattaaaatttctaatatatttaggtataattttagaatggaccatgttccaaatatttgctcaaaaaattatttgtttagaatgttgtccctgctaagccacaaagtgcccttgaacatgtggtttatctaaaaggtagctatattacaagctttaatttattgagcacttccaatgcgctagacacattttaatttgttttacatatgcttttctgaggaaaactttacagcgactccatgagttaagctaggcattttcaacctcatttcctaygaggagaaacagactcaaatactttaatacctctgatatgcctccaataaatggcagaaccaaaatgatttcaaaactcatgcctgtaagtactatgctatgctacttctctaatagaatatatatagttcttttacaattgcagggaacctttctgtttgtgtggaataattcattacatattttgccttggcatataagaaacactgtattttgaattcacaggaggggagtctttctaggttacttccaagggcttaggtaatttgggcctgagtcatgtaataacctacatttgaatcagctatgtaggtaatatttacaattttattattacaaattttggtgctctaattttcagtttgtcattttccaaatagtgggggcagttttcttcctgggaggtgaaagcgttcgagtttgatctggagtgatgtgaaccaatgtgtaaatttgtatttcccttcatctcacatcttccccctacagcctcttctccagatatactcatttcctgggtgatttcatgccatctattgacagatgcctttcaattatttatctccatctcaggtttctctaagtttcagattcatatattcaattgcctactcagtatttccacatggatggctaccaggaatctccaaattgataaaaaccattcaaaacatttgattctcatcccataatacctactttgctattttaagtttatttctatccaagtctccaaatcccttttccaatctcaataaatattttcatttaccatttcatcatataaaaatgaaaaataattttttcctcaattataagttcttagttggaccaaaaggcagattaacaagagaaacatagtgtattaacatgtgcactgcwcatgatgtgagagaaacctcaacaaagcagtggcttagaacttctggcttatatagcatcttcaacaaagaacagtaaatttatagagaaattacagaacagaggaaagaggttttagttttaggagaaaactaatggtgtaaggatcctttgtagattcccctgttgcctctctaagctgataagcatcagaattgtctctggtgaaggagaatgcatatcctgcctttaggcagaaamaaacagaaggtatggagagctttcccctcatttgcttctcctttaatgtccttcaggtaaaaataaattttatgtcaaagaggcaattttggggtgacattttggtttccttcagttgctcaagccaaaaataagagagagagaggaaaaagaatagaaattcatacttgatttttcatactctttctcacacccattctgtgagcaattctgtgagctctgtgttgagaatatataaatatattccaaatctgtctgtttcttccacgtacactattatcagtatcatttctcacctagactactgcagtggtttctttgttcccactcttgtctcccctgtaattccatttcccacatgggagccagagtgatcttttaaaaaaataaattggattgtgtcattcccttgcttaaaacactccagtgccttcatatcaaacgcaagattaaagtgaaactgctttctaaggccttacatgttctaccccatggcagcttttccaatctcatctctgatttatcttgcaagtcttttctagatctggcaatgctggccttcatgttgttcctcaaacatagtaagttctctccttcatcaggatagtcatactaatgttttcttccgtctgtatcatcctgtcttcacattaccatatagctcattctatcactgtatttaagaatttgaaatcatatcagctaatcaaaggagacttccctaactgcccttctaaaatagctgccatattcaggttcattttctgttttgtttttcttcatggcacttattatttttcatagcacaaaccccttgtgacctgacattacattgtatgcatgtgtttaaaatcagttttgctcagtaaaatggaagcttagcatgggcagggacttattcatcaatgtatctttagctcatgcagcaatgactggcacagaaaacctgtttaataaatatttttgctaaaaaaattatttcatgttgtattttattttaacatatacgtttatgtatatataatctactaatttacctgagtgtgtatgtgtgagcatatatatctatgcagagaggtggggatttattaggagtatattaataaaaatgaaaatatgctattctgtgatgatactcagttatctggtcaaaacatcctttggttggtaatggatttattctgatctagtccctgtcttcatccagtttacacaggttgcatataattagccagacaattttgtgtcattcaagatacaacctggttcagaaaaaagaatcttgaattgtaccttaatgcaacccattacagtgaggttacagtgtcactcacctcggaaacagtgtcctcttgtatatacccatttcttcccttaactacatcaaatcttttttctgacttgaacattttgctagcatttttagtactttgttttagtagaaatagcattcagctgcaaaaataagacaaagaaaacaaaaacagaaaataacagtatcttaaaccctattgaatttaatcttacacataaaacttggtctgaaggtaggcagtctggagagcatagggctgctcctggaagttgtctgggaccctgagtcctattaacattctgctcccctttcctcatctccagcttctgaattaaagaccccattataatctaatacagctattggagttcctgccatcacatcagtgttccagatagtagttgggaggaaatggggaaggagaaaaaaaccatacttgctagctgagttagcttcatataaggagctactctggaaaccccacataacacgtttgcttatgtcacactggccaaacttcactgcaaataagcctagaaaatatagtgtgttaattggatactttgctactccaaataacatcaggatggtataactgaggaacaagagggggtgcatattgataaacaagtaagagtcagtgccagatatatgtgttttttgtggaacttattctactgttgctatagttattggcataagtttattttcccatatttccattacagctcccactctcatacatcacattattctcatctctctgtacctgccatcccatctagcagtgtcttttaaccaatagttagtcagtaaatacttgctaaatttggatttaaatgactcaaacccattagcttgtttcattagcactttattctggcagatgataaaatgctgaagaagccttgtctcttgtgtcctctgcacttctacagatattttaaaaacaagaaaaatgaacgtattctgcttaatactgtatttttagataacaaatggacaaattgcatacttaactttgaatgaaaacccaattgagttatcagtggatttgaaagagaagtattatcaatgcaaaacactgtatactgtgatttgtattaaataaacaaaaacttgaaacttctgaaggaatttgtgaatgaaaggacattagttaccttatgaagttaagcacagggaaatatctaatgatccttgctccttcagctaaattatatgcaataaggaatttacacttctaaagtatatttcctgttttactcaaaacatgttttcattttacctaaaaacctagcttttaaaatgcataagaaggccagccacagtcgctcaggcctgtaatcccagcactttgggaggccaagagggggtggatcagttgaagtcagaagtttgagaccagcctggtgaacatggtgaaaccttttctgtactaaaaatataaaacgctagccaggcgtggtggcaggcacctgtaatcccagcttctcaggaggctgaagcaggagaattgcttgaatccgggagacagagattgcagtgagctgagatcgttctactgcactccagcctgggtgacagagcgagactctgtctcaaaaaaacaaattaataagtaaaataaagcatgtaagaaaacatttaatagaaaattgtttactctctttccaaattctaaatatcatctctatggtttgtataactttgtagtaagtttcataaacataactttcctctccatattcaactcttaatgcaaaaataatacaaacaacttttcaacatttttaggaatgtttcttgaggaatcattcctaaaaatcaaaatagcctatttaagtttttaaattgaagttagccagtaagaaagtctttcttcggkgtcttagtttctaagctcactatagatttgtgttttatgacaatatataatatgtctgattattactgacagccttgtgtcatatgccaaatagcctctaattttaattttgatatatttgtgacacacacctatcaattctcttacaattttttagaagacttggcaagatataaaaattatattcctagttcttgttatgacaaattgtgaattaccaggagacaagaaccgtatacatatactttactgcatcttctaaaatatctagctaagtgccttgcatattttagatttttattaagtacttattgaacaaagtatttcttaagtttcatgaagtacttcttgaaagtatagcagaatgttaggttaaaataatgagataaggaacacagaggaggcttatgtgtactttattccactgatatgaatatattaaactaaaaataaatttatgaaaacttagatttaacctagattagaactttaattaatttggaagtaacttttctttgctccctcatcataaaaaattattttcctttatataagaacatttatcatggtttctttttatttgtctcacttttgaaatggaattggataagagattcgcaaatgacaaagttagaacaaattcagtttagagatcttcattggcttttgtttatgattctggaatgaggcaaaaccccattctataaaatagagtaggtgttccaattagctgagaaaaggagtttggttgtatagacagcaaagggaaagcagaaacagaaaccaaaaagcagattggctgtttcaaagttactgtccttttaaaggttaaagcagatggaactcccgtatcattcaggttaaaactggcttgcttgggatttggctattatatctctcaatcttctgatttataaggtcagataaacaacttaatttcaggttggtgtcatggaactttagcatgagtgacttcattttggtttggtctattgggccttgtacaggagcttagtccaaagcaatggcctcctataaagtttatttaacaaggtaatgagaccctggttctacgtagtgctccagaatcatgggcacttaatccattcaaccaaggaagcagacaagtgccagaaatggctgaagagtccacatcaagttcctaatcagggagctagctgcaaggtagaatccaggaacaaacaagagactagctgctggtgcttcaaactcagttttaacagtagggaagtaagccaaggagcacatcaaagagactgtggagtttttttcttttaaatctcaatatttacttttacatttaaatgtgatttaatggatgatgtaaaaatgtaaagtaggcaaagctcaaagtggggactgaagacaaccagctgtacaatagtccttgtttccttttctttttttttttttttttcttttgagatggagtttcactcttgttgcccaggctggagtgcaatggtgcaatctttgctcaactcaacctccacctcccaagttcaagcgattctcctgcctcagcctcccgagtagctgggattttaggcatgcgccaccacacctggctaactttgtatttttagtagagactgggtttctccacgttggccaggctgggctcgaaccctgaccccaggtgatccgcctgcgtcggcctcccaaagtgctgggattacaggtgtgtagtccttgtttcttacatcaagaaccagaccctatgctcctattaagaagaaaataactgaattatatttttgtattaaaaataatagagatgtgaaattaatgtgtgtcttttatctttgatattgctaatgggggaaataacagtaatttaaaacagtttttttgaataaaaaacttaagacatatatttggggaaaaataaaatgtttatgattcaatatatataaatatccaaatacataaatacatgataggtgatcatttctttgggaaaaaaagacaagcagattaaatttcttaaatataattcagatagcagttttgaaatttactgttcatctcatacttaattttattatttctgaaataagaaattagtgttactatgatgccaaatcaggtgttatttttaagtgttttttccaacatgcactcaatgatgttatataattatgttcagatcaacagatatatacccagtccctctaaccataggctattgtgtgtgattctgcaaagaatgataaaatgagaaagatatagctactgttcttgaggatattaaaatatagtatgttgaatagaaaaataacacaaaaatagtgtagtaggatggttaaaatagcaaactgacagaagtttgtatatctcatggtgatggctaaaggggataatctgtctaaggggagaagggatttaataatatttcatgctattgtatttgaatttttcccattctgttatgttcttttagtaacaccctatacactccttccagtctgttttctctaaacctcccttttgtcttcttactggaacatcttgcacctccttctaagccatccatatgacctttagtcatcctaaattcraagatccattattaaattctcttagccgtatttctagacaccaacgcttcctcccaagtagtagatatctttcttttatgttaatcctctgtaaccctccaaataagctcaattatgacacagcattggaatgatttcttatgtgtttctctaatagactgtaattaatctgaaggcaagaatgacgttttatttatctctgaatctgatttttcaataaatctcaccaaatgsagaggataactagaaaattgagttctttaaagatattgggaataggacaaaatgctacctcagtaaaagtgacttaattttataaataaaacgggattaagaaggagatgaaatagtctcagaagcaaaatagtcagaaccagaattgtgctggtaaacatttaatagtaaatctttgcaaaggaaacaaacaaacaaaatgatttgtagactttgtaaatttctatgttgttattgttgcaccatggccaatttcaagctaccaagtcgtgtctctgaacttggagttgggaaaagatgagcccaatcagctcttgtaagctagtgcaaggcaactccagtgaagaactcaygaagaactagaaaattgtttgtcccttgtagtatcccactgtggttttcacgatctgatactgaaatatgtatacacaaaattgatttaattctttctgataatttctttcgtcttcaccacatatataccacagagatgtactttttaaaaatgaccaaatcaagagcaaaattattaatttcaaaaaatttacaaaatgttagaatttgacttacagaaaattgtrtacatatagttaaaacagctgtataaaactacttaatatgaatattttctttaaaattattacattttaatattgtaaaatattataaatgaagtataaatatttcactaagaagctttatggatttctttaggaattttttagtttcactatgaagaaaatataccaagttaaaacagtcttgtaagcaataattattgcctatttaaaataagaaatgaaggatatataatgaatatattagtaaataaagtaatatgtgccatttcgggttgaaaagtaactgtgaattcaaccagtaaattatttttaaaatactgtcaagttctgttcatgtattatatgaatgctgactgtacataattttattcttttttaatgtttgaattaatgacactattaatatcttacagttaacatctagcagaagcagatatgagctaatttgtattttcctgtcatataaaatctgaagtcttcttcagtaatgttaattttatcttgtcattttagatcttttacagcacttaatatcataattgtaaaaatattgttccttattaatatttgaacaaataacaaaaagtaaatccaataatamtatttataatttattaggacatagaacaatcattttgaataagctgttattaattagtttatgataataatactagtaaaaaatttcagactttcaatgtatgaaaaatactcagtttaaacaaatagaaatgttctatatcattaaggaaccaaatagtctagtgattaaaaatacaggttttagaaatagatctaagttgaatctatgctctgtttcttgttatgggactacaggtaagttttttaatttatgtaatctctcacttatgagttagtttgatgctgaggttacaaaaacaaatacggccaacaaagtctctgtatgcatgaagctttctgttttttggcatatacagggagcaaacaaatactcatagtgtggtaatagagaagtaatagagaactgcaggaataaagagtaagttatacttaatctattctcagaatcagaaagccctcctgagaaaagtggtatttaagctgagacttgaaggaaaaataaaaattagctggataaatgtgaatatttgaaatgacaataccaaataaatttacagggctctctaaaattaaattaaaatgccacatataaatcccttaacagtcactgatagatgctgaataaacggtagatgatgctgtcgttactaactatggtttgattctctattagactccctaccctcacacttgtatggtactttttggatttatttatgatagaaatagtctaattgtgctcacactgactgcaaaagtactaaaaacacaatgagaccaacaatattatcttatttatctttgtgtcttcatctgatcacactgcttggaatttaaacaggtgttctttaagtcttccttagcaaataaatacatgaatgaatagggaaaatacagcttttaaccattaatacagaagtaaagttttgtgactagatgaagtattgttcagtaaataaaatacaggtttgctcccacttgtcctagtcatttggcctccgagttataggatggatatgtataaattcgattatttattcaactatccatatgccagtgtcggcaatatattaatttcaaatggtaacacagcaatgcactgatttagtctgttggatctgagtaagtgtaatttttaggagttcatatctataaacattaccccaaattgggattgaattggaaaataatctgacacaaagcttccctaaaggcagtgctttgggttaggcgttcattaaataactgaatttaaatggtgaatggactctttttccttctggatcgttgtaagaatagcagatttgagatgaagtgaatttcaaagtgttgcaaatggccaaagtgagaagagatggctcacaccaagagcatcagctgatttctgtagccatttcttaaggaggctgacaaattaacttgagaataatcaagaaaggtcaaattatgatcatctgattattttaaaaggttaaggaaatataaaaacatataaagaaagtaatttcagaaactaccaacatatgaaaagctttaacattttagaagactgatatgatttggctgtgtccctacccaaatgttgtcttgaattgtagttcccataatccacacatgtcgtgggaaggasccgacaggaggtaattgaatcataggggtggttacctccatgctgttcttgtgatagtaagtgagttctcatgagactgatggttttataaggggcttttctcccttctatttgacacttctccttgctgctgccatgtgaagaagtacgtgtttgcttcccctttcaccatgatcataagttttctgaggcttcccagccctgctgaattgtgagtcaattaaacctgtttataaattactcagtcttgggtatgtctttatcagcagcatgaggacaaactaatacagagacaaacttaagttatatgtgttacttgttggttctccttagttgaatcactatttttgcacatccaggactgccttctctctgtcttcttagtatcatctcttgcactaccaaccaaaacagttctctacagcgtagccatagttatcacttacaaataaaactttgattatgcatcacctctgtaaactgtttatggcttctaataatagcacttagataaaagccccaaatcctttttgttatttcacacaaaaataaccataccaatttttgtttgatatgaaaaaatacatgtagtgggctgaaaatggttctcccaaattatcatgccttaatccgggagcctgtgtatgttaccttacttgaaaaagggattctttgcagatgtgaccaaattaaatatcttgagatggggagattatcccagtgtatgtgggtgggtcctaaatgcaaccacaagtaagagagagacagagagagatttgacagaggcagcagaagaggagacagtgtgacaatggaagcagagattgagtgatgcagtgaggagccaaggaatatgagcagtgatcagaacctcaaggaggcaagaaacagactgctgtaaatggtcaaagtgagaagagatggcttacaccaagagaagacattaaagcagcagctgatttctgtcatcatttcttgtactaccaaccaaaacaactctctatagtgagaattgtcataattttccttgtgaatttgcatattttcataatacaagctagggaacccactaccagagaaaggggcttagttccacctattgagtaccttaaatcatggaggactcatgggtggagagaggtcaagcagtagactactaatcttacacagcctggaagatttgggaggagagccatttgtccctggtgcttcctgcagattccactatttttaggagccagtgaagcaaacagatgcactgaaaaacaatattaaaattgtttcaatgttctttcaattgaattttaactccaagtactcatcctttagtgatggtaggaagtataacttcagttatttgtgagttatctcaaccacagagttttgtcagtgtcttgatattttacaaacaatgtatccattggaaagtcccatcgagatgttggtaatcagttcacagagcacatcaaccatttaagtcccatggctctgcccgtttatgtcccacagttctgcccatttcatgccgtgctagagatgtaagcactttgggaagaactagaaactcctctgcctaggatctagctcattaagtcaagagtgaacaaggtagctcttcctcactgagtctttgccctctccccagatgatgccaggaacaagcactaggtctccttcattcattgaaccaatacacttcttctcctatctactttaggaatttttcctcatttcctggtcatccatttctcaaatgttttcttataactttccggtgtcstctgcattagcttttaaaatgtttatgattttataaagagcttctaatttcacattgattatttcaattaaacctaattccttgcttaaaatgagaggaaagaaggaaaacatatcaggaaaaacagatatttcaacagttcactaagttatattgactcaccaggttgtgttctcctgtaatgtgtttctcctaccacttcatcctctttttctgaacacccaatatacttctagaacttgtgccaagtcttcccttcgaggtagattgtaaaaatcaatgagagcaagcttgcacttaacacatgattatttaataaaaaaaagagaagtacttcaggagatgataccaccaaacagaatgtgttttatttgtttgtttttaacagaattagttttgactgatagagtataagtagaactataatccatgaagccattcatctgctatacagaaaaatcaatgcttggtctttaaatataaacatcgtcttcaataataagactgaatttatggaatgcacaaataatactgattaatttttcttaggtgttttatacctacagagacatcaattgtcacccaataatggtggtttttggagtataggctgcatggatcataatggcaaaccttatttaaacagaaagaagagcagaatatcagtcataatgttttctctgtaagaactgaaaaattgaagtaaatatatgaatcttaaaatatcaattgtaatattggcttttgcaactcaggcaattataagatataggacattttaaagactaatgaagaaaattgtatttaatttattctaagttttaaaaactttatttttctcaactagagaattagttgaaagctcccaacccatgrtttcctaaaaaagtcacatctaacttagatattggtagcagttcatgctctttttaccgctggcttgtgtcccttccaaacactttaatggtattttactgttaaacaatatatatttctcaccacttgaaaaactaattcaaaataatatttctttattctatgaggtctctcactattgtcattctccttttgtggcctatgctcatttcttttccccaatgaaaagtagagaaaaaaaatcatgacaaccttgtgtgtctgcaagtctctgtaaaatgcctccatccaagtttccttccaatcaggaacataattcttagcaaataggtcgctaactcacttaattaactctctgctatgtccttagaggagtttctattatcaaacttgaattggaataacatttaacaagctgtacaaggcctttgggaaacctgtttttcacaaaaatggcttcttaaatgggctttgatctccttaaaggattctgaattactgcataaaatcctaatgcacttattaacgatgcatatatatgcagattttaaacagagtgaaagataaatttcttttctgcctccttggggagcatcctaatatggattttctttaaacatttcttgacctattgaacatttgataaacaggtattttacycaaagctccctccagatctttgacaattaagaaataacataaaaacctatttaggattgcatcgtactcttctctgttagtatttgggatagagatttgaaggagagtgatcctgttttccatttttcgtctcatataattttttttaatgcttactctttgtcagtcactccactatagacagggttgcaaagtcaattaagctatggtttctttgtttcaggaaactgcagactagtgaaaagtggagcagaagagaaaaaaataaacaaagaaaatatacaatgataggccagactgatacattgataaggcttataatagatttttacctagatacaagagtcagacatctaatttagaccaagagaggataatattgtgagttgaattttgcagaatgagtcatatgttactgaataggagaaggctatcctgagcagaaagatggatatatggaggtaagcatgacctgtttgagaatttttaagaaatttatgactgtcagctgtatgggttcctctgagggttggtggttgacaccaaagaggttagcaggaacattaaaggcattgtaggaaaaaaaagggaaaatgtgtgtgtgtgtatgtgtctgtgtgtgtgtctgtaattaagtaacctagagaggaaattttagagcataaatttttagaaatttggggacttgtcatatgccaaaatctagacaaagcaatcagtgcctatcaaccagcctacttatatttgaacatagcagatgagtcttcctagtgcagatgaaaatattttctatgtgtgaaaataacttcctgaaagttgtgtccacataatttcccaagttcatatataacgttctttatgcagaaattttatttacaactgaattcttgaggatcacgcctactaagtaacaccaggtgcaactaaataaagagaagtaaaatatctgaatgctcacccagaaagcgatcaatctatttcattttaatatattatttatatttagtgaatatacaaagaatatgtcacaaatcattggccaggcctggtgaatgtggacctatagtctcaactactcaggaggctgaggcaggagaattgccagagcccagaagttccaggctgcagtgagctatgatcatgccactgctgggtgacaaagcaagaacctgtttctaaaaaataaaaaaatatatatataagcaaaattaccttgtcattatgtgatgccatctggtattgaaattgaattttattcacacacataatttaatacagttttttaaaaatttctggattccttctctatattcacacattttggcaataactcatacatattttctctccattgatacagaagtagggacactgtaaagatataaaacatatatgacatctaagaacccttaatatttgttcactagagctcatacgagatgtgatctatactctgtagtttggagagctaaagcaattcataactactttagcactcagttcaatttaagatgaattgcctgtcttatgtgaatgtactactgagcaagctgaatgtcacttatctgatgaaagaacagtgcccagctatctcacatacaccctgtgtatcattcaaacttggaaacatttatatcatagtcattatcttaaaatcacagtgtttgccaacaaagccttccggcttgattccatagaaggacatttaaaaaaagatatggcataacagattcattgtcctgcttgtatgtgtttytaagtttgttcttttttttaggtaaaataaagaatttagcagtagtgcaaccattcacagttctaaaagaagcaagtgcaaatgtagagcaattttttttttcatgaaaggcagcataatgtgactgcacttacactttggatttgcaatttcactgatgatctaaataatgccattggtttaaacagttagttgctctactttgaaaattacctttgacctttttctcactagatatcaattgaattccaggttgcacatactgaactaaacgaggtaattgctctggccttgtgaacttaaaaggcaacttctttgtgaatgtatttgttggtatcattaactrgatctaagaaaatataatttttataaagttagatcattcatatctaagttgccttttattcatgtggcttagtaaaagttaattgtactttcaaagtaccaaggcaaataaacagggtaatttttttttaaagggtctcgttctcgctctgtcacccaggctggagtgcagtggtgctatctcagtttgctccatctccagggctcaagaaattctcccacgtcagcctcctgagtagctggaactacaggtgtgtgccaccatgcctggcttatttttgtatttttttgccatgttgcccaggctggtgtcgaacttctgggctcaagagatccacacacctgggcctcccaaagtgttgggagtataggcatgggccaccatgcctgaccaaacaaggaagttctaataggtgtctgtggtaggctctaagattgccccagtgattctcccttctcagtgttcatgatcttgtataattcctcccctgttgacttgctccacatgaatagaatatggaagaaataagttgtcactttcatgattagtttacaaacaactgtggcatttgtcttgggtgctctaactcaccctcccttggttcactcactttgggagaagccagtactgtgtcataaggtcaccctgtggagaggtccaaatgactacttggaaacaggttttctgaagcctgccaacgaccttgtgagtaagtagatgcaatctttgagtcaagctttgggatgattatacacctagccaggagttagaatccaacatcatgagatactgagctggaggcaccaacataagctaggcctaatttctgacccacagaaactgtgaaataattgaaacttattccatgctgctgagttttgtgataatttgttaaataacaacagatacctatatagatttttattctgagtgtaggatgctgctgtaataagtctaaaatatgaaggtaactttggatctggtcagcagatttcaaggagaatgttagtgaaagtggaaagtgccttgacggagctattgttacatgtctcatagttttcaataaggctgtaggttaggactttcagaagatttaaataaatggtattggaaactggaggaaagataatccttgttawatagtatcagaaagtttaacaacaacattgattaaagtaaggcagaaaatagaaaatgtgcctaaaagactggacgatttgcctaaggagatgtcttagcaaagagttgaaggtgctgtctcgttttctctagcagtacatctatagagtggggagataaattaaaggaaggattgttaaccaaagaggagccagtacttgtgatggctttgaaaattctcagcctctctagaaatcaaataatgctaaatttaagaaatggcttcaatcaaagatcaaattcagagtacttccaggaaaatgtagtccaaaaatgaaagtgagggtatacataaaatcttttgtcaagacctcagaaagattaaagctggtgactcagaaagcccttaaagagattaagagcataccctctgtgtcctctgaaacattattatagcttctagaaagtttaaagacaytattgctcatccatagaagtaggagctcaagatagagaagggcttatctcaagagatttttgaatgtggcttttgtcaaatgatataaaccccaagaaacttcacaggagacccatgaagttcttaagttatagatgcagaaacattttcagcttgaacaaagtggggaacagagacagtttagaattagaagaaaccgtttgggctctcagaattatgctgatagggagtagactgagagagctgctcaactgaatgatgactcagagggcagaaccagaccccagcagttaaagccaagagccatggagaattatacaaagtcttttgaccttattaagtaacttccagtaattgcataattggacttcagaattgttataggccagtggcttttttgtacctgccattcccccctttctgaacagaaatgtttaaagcagttaccctctatctgtatcattattatctgttgtgtatttgggaaaccagtatctaccagttttcagacgaagagggattatattcaaggatatgtatttatggaactagacctgaagtgtctacaccatggctgaacctgattcagatgacaagattatttaatttgagtaggtactacagtagtatcaaacttttgacgttggtggaagtgggtgagtatattttacatgtaaaaggaatgttaactggatgttaattagaggccaatacgcagagtatagtgatcctcaattatccctaccacctggtattcaggccctcatataatccccattttttgagtgaaggctatgtttattagcttctaacaaatatgatacaacggaactgatggaaagctactgctgagactaggttttgaagaggctgtggggcccatttgtgaggctctggctcactctcccttggatcccttgtcctgggaatgcttccatgtcatgaggaacccaacagtgagaccttcatgagtgaatttagaaaatgatccatcagttccagtggatctgtagctgagaagaccatagccctggcctacagcatgattacaaccagaagagacctttagttacaagacccagctaagccatacccaaattcctgactcacagaaactgtgtgagatgataaatacttgttccatttaatgttctatgcagccatagataactaatacagcactcaataaatgtttgctaccaaatattatgcgaatggaaggttaaactgtaaataaagtgagaaaaattagggcatataaatattaacattttgagactgggacatgggtcatccaagtcaatatttcaataataacatatagaaaataatgagttattgaacaagattttaagtatcttaatattgtgttcaaatgttaggggaaaatcccagagcaagtaacatctcttatgttaactattatttccttgctatcctttagtgtattcagtggttaccatgtattatgccatcattgtattcctttttctttctgtcattctatttccctctactgactttttttatgccaaatctctttcactagcactctctctcactacaatgcttcattatttctttgtctttcatgagattttgttttctgtctcacacatgtacacacaaaagcacaaccacatgcaaataactaaaatcattgagttacttatatagtaaaaattataggagccaaataaaatttcttgctcaatagtttactaagtctgaatagaacaaatcattttaacaataatgcaaaggaaatctatcacctaagttggaagaaaaaacagttgtgatttttaatttgtttcacaagaaaaaaattactagaggtgagtagttttttaatcattcaggaactcatgattatcctccaagtacagaatatctgtttgcatgggattgcttttgctatcataaatatagctatggaatttaatgcattgttggctattcacccttttatatagctrtgattttaaagtgcctacactctgcgaatatttacataaattatcataattaaccttctgtggcttttatctttataatgaaatatcccttcattcgaaataaaatatgaaatattatttttcatttctaatgatactttgcttataaaatatattattctaagattgttagtttgatttattggatttattcgataattatctttttttagacaatattattgagggaccactttttaaaattcagaaatagatgttcttaaaatgtattgacccatttatatcaccttatagatttatacttgaattggtagatataaatatctactatttgtacatcccactatttcttttcttttagctagaaaggtataacgttaaaacccttttaccaaataaaatgattttatttagaaaatgccgggcactaaaaaaaaaaaaaaaaagaaaagaaaaaaatgcatatttttgtagaaagtgagatactatttttattacaaacaactttaaaatattttatattgagccataatgcatgaggtggcttaatttgtaaattttcaattttgaagctatttcatagatcttgatattggcatgggaaattggctttctttttgaacctcagtggatactacttgtttttcttcttaaacacagctttgtgtggtgtatcctctggtttcctgttactatttctccaatattttgacttaaatttgtttcatgcagtaattcttaggtgtcattaccactggcacttggtaggagctaaaacatatagccagtataaattttgtctatatggatactcgagttttgatctttgtttaaatcccaggtgctgccagactaaaacaagaaattatgcaattctcctcatataaccagctttagttctatagtgacttttcaccctgagaaaatttgatctaaggcaagaaagccactaacatttgtgttattcaataaaaaaggaaataatttttcagaaagcatgtaagatatacataagatatcaaattataaacacactcccttatttcttagagaagttcctatcatattgttattcaaagataatgttttactgagatagggaataatatgattagagttttgtgtttgaatcaatatattatgacaatcatgtcataaatgtctgagagaaaatatatgacaaacttcaggttaattactatatattataaaaattgagaccagtttttgagaggtgatgagtgagagacataataaatttatactcattatttattgattactgttctatatattctaacagataaaatttctcacagaaaatgtcaggtataacttacagtcactactggaacaaaatgcaaatatttcagtgtcattcgaaaaactaacaaggaattataagtttcttataatatatcagtcaatcaccagactcctttcatacttggaaatgtttccatgcatgggcttaagttaatgtagwattcaaacatttgagttctgttgtagcagataaaatgaagcctcaaatcattctctaatctgaagtacatcctggcagaactactgtgacttgtctgttaaaattgatttcctcttaaagaaaaataggcttttcttattgtgtcaaaaaatgatattatctattatgtgtcttttcttgtgacaatccttaccttttatgtcccagaaggaaaaaatattgtttttcctcctaagtttttatatcctattttactctaatgaataatctgtgttgcacacgaaatgaaatatattccaaaaagagtaaagagcaatgtttaaaaatgagtgtagaggccaggcatgttggcttatgcctgtaatcctagcactttgggatgccaaggcgggcggatcacctgaggtcgggagttcgagaccagcctgaccaacgtggagaaaccccatgtctactaaaaatacaaaattagccaggcatggtggtgcatgcccttaatcctagctactcagggggctgaggaaggagaattgcttgaacccaggagatggaggttgcggttagccgagttcacgcctttgcacttcagcctgggaaacaagagcgaaactctgtctcaaaaatgaatatagaatgggcagacatttgtaatactactgattgcccttaccttaattcacatcatctctattgtttgactttataatgctttttgattggcagccttgaaagatgaatcgacacatcagaattttacaatgtaactttgaagactgctagggaaccttaggcaagcaacttcctttaggacactaaaaatgcttgatggggtttggaactgaggtgctttgtgttagctattattgttagtgatgatggttaggtttgtgattattttgtttaataagactactcaggaataaaaagctaccttcaaataccttcccacctcctctccagtattttttaagattagactttatccaccctaaattacatctatattgaatggaaaaccaggtgttggtattttctgcactagtggcttaatgatagtttattgaactgtaatgctttgtaattagaatatttctagtaaaaacaaaatgggagagcccagaaattgtagttcccatccaaaattacaataacattatttctgtaatagcagaagagaaattagaatgtcttgaggtaatagctcacatatttagaagaagaaatttaaatattgaaagaacatactcaaaaaaggagacgttagatcgggtattcagaaacttcagcatgctgtcaatagatataaaaatgcaatgacattcattttttgatcaatgaaatgagaattgtgctggctaaacactacataagatacgataaaataaaagttggtaagttataaatactgtaagtgccttgggagtgagatataagggcacatcatttttatttaatttctagttagtctatgagattgaactctcagtacttatttaaggccagaaatttaattacaaaataactataaggttacattttgatctcaggttaaaagaataatattagaagcattaaaaatatttttgtgttaatcagcgtttaggaaaacagcatggtaaattcctgtgaaattgatttatactttcttcatttacctctaatatgaaatatattttatgtttagatttgcttccttaggattgtgacttgatttttctctttgctcaaaattatctgtgggtgtattattctttggggatagtgatggttaagaaatgctatttgaagcctcacactattagaagagttagttactaacattttcatgataatataatgagtcatagaaaatttgcattgagatttattgaataaacttgacatatttaaactgtttgccataattatgagcctagtacctgtatgccacaacagtattttaaagtactgtactttrcaccttcttcactaagaattgatctgataaatccctttttgctagattgtgtcatgtccatctttttaataccttccttgttcattattaagtgctgttagccatactgtctaatgaaaggtacataatatcaactctgattactgctgtaatgttttccaggcatgcttggtgatgagcctggcataygaaacaatttcctacagtaataaaactaattaaagtaggcagtcatccacacaacacttcctaatgaattataataagctcattaatctcatctgttcttattccaaaaagaccactaataggacctgtaggtaagagtacaatcctcagccttaaaaatggacagctatcatgaagtcagacttaaggatttaagttaaaaaattacaaattgctaatcaatgttgtaaatgaaatgtgtaacgtctaaactctgctcagattatttattgacaagatccttttctatttgagttctcctataattgatttaacaaaggaaaaaaatgattcattgtaacataatgactcttcaccacctcaaagattacaattgaattaaccctctcacatatcctcctatatagaccatataagaatcatgaattgagtacttgagatcaagtgataaaaatatagcctgttttctctccacagagggctggagtatcttcttaaaatgtcaaagtataataataattattcttttgttaactcttctacagctttgtgaggtgcctgatcaaacaatgtaactaattattattccattcaggtacagatagtttggtaacatagatgtattgttctagaaacagttttacagtaaaagagataaggttgtaaaatataaaacatggagagacgatttttgaactacaaatgtgaatagtaagaaaagatcactttaaggggaattttgttttatcttcattgtaagttgatgttttttaaatgcagcagtttctgttctaaagctgattactactgtgccacatgtatggacttctttccttagaagtgacttataaatatgtagatttcacaattaatgcasaataatgataatgggttaatcgtaaataggaaggtacatttttcacttatggaatgatcatgttcaaaattgttatccacatttataaatttttagctaatatttcatattctttgtggagtaagagattggatatttggcacagaggattttcttttgtaaaacagatatttaaaaataygaccactttggtaggtagaggttttccttagcctatcactgaggaaaatgtctcccaatctagaatcaactatctagttgccatgtgtgtgaaggagagttggttctgtgctatgaacaattaggaggcctgactttggcaaagacttctccatcatctagttgtacggccttgagacagcagcttacacagcatgcaatgcatctgtctttataaaatgagggggttaggctagagcagtgtatccccaaatatggaaagtaccagatagtaaattttatgttttcaataattcttggatacaacagtaaaacaattgtactgtatgaggtaatgcaattcctcttttaaattccaattcaattctcctgaaatcaaggaggtaagttttgtgctgtaagtctgtaatacactggcaaatcttactttttgttttgacaaagcaggtagatcacctcatagttactaaaagacaagggagatgtgttgctgaacagaataattttgaatttaagtcttttggttaaaagaagaaaatttcttgaaagttatctcaaagataatagaagattacacaaaagtcttaagaaaatgttcacagctcaaactgaccttgttttgaacacaaatccttatttgagaaagtcttgctccaattagtagacttaattaatgtcacctattaaggtaagctagctatctattgaataaactttggtaatagactttaatgttaataggaaacatgacttatcatcataatatccaacatttgtttaatgcttaacaactaatgtttgttaaatgcttggaagtcaggtactcctaaattatttacatgtattaacacgttagtgttcaccatataggttaatgtttacaacaaccttattaaataagcactaatattttccccattttacaaatgaggaaactgaagtgccaagagatttgagcaatttgagaaaggtcaaacagctggtaaatgacaaagttttaaaaattctgtaagtacccaatactctatgcatttctctctcttattgtttcctatctcaccatccccagtaatccttagttaacttcatcctctccattctcaaccataagcttatatctttcaacattatattcgcagtatctggcacaagataggcactcagaaggtatttgttgaaattcgtatgaatgattaactaatcaatgaatctgtgctataaaacagacaaattaaaaatgcctctaagtgccgggagcggtggctcatgcctgtaatcccagcactttgggaggttgaggcgggtggatcacctgagggtcaagagttcgagaccagcccagccaacatggtgaaaccccatctctactaaaaatacaaaaatcagccaggcgtggtggtgggcgcctgtaatcccagctacytggggggctgaggcaggagaatcgcttgaacctgggagacagaggttgctgtaagctgaggtagtgccattgtactccagcctgggctacagagtgactccatctcaaaaaaaaaaaaaaaaaaaaaagcctgtaagcgtaacttattggactttaagacctcacacttagtacttcctattttcctccttgacttagttttcttctgatcatcaattattaatcatggataatttgaaaactgtgctttcatgaatactagaaaactgtgctttcatgtcagaatgtacaggttcaaatgaatatgccatcacttatctccatctatatacttaactgtgtgactttgaaaaatgtatttaactttctcagtttcagttttattatctgtacaatatagatattaatatctattgtatatagccagcaggattgttgtattaactactttaaacacattaaagtgtgtttaaaaccaccaagaattttcagcgtattgtacatgtgttatgaggcaatataacatcatattgaaatagctagaaattaaagccaaacagtccaactattgctgaagagttctgggagattaggtaaaatgtttacacatctaaagcattaatgtctcaatgcttaatcacaaaatacaagttcctaactcagggcaattttaagggctagatttgataatatgttcagagtgcctggcatacagttaaaaccaaataaatatttgttgatcttgtttgtcatagtgttccttttcaaaaaaaaaatgttttcttattcatttggtttaatatctggggaaataaaagactcaatactgaatacatttcctagactattttcctggagttctctcaaaaacataaccactatttttgcctgtaaccaaataactcagattatattatcttgaacactgtgctgcttaaagctatgattgcaagtagtagaaaatttaggactaacaaagctaatttgttgagtctgtattttacacatcagtggcaattggaagactatgataggaagaaaatttaaactctatccttgtattcacaactccctaaatagaaagaaatggaattcaagcattcaaaaaatttactggagaagattaatttgaaaatagaatgtgcatgagtgcatggatagatgtatctcttcttggatgactgcaagtaagccttgctatgaaaatatctaagaagcaaaatttattgtaaataagttttccattaaatggcagtatcttattgggaatgcatttcttaaaaaaaaaaaaacacaaaaagaaacccatacactaacrtattttttaaaaaaatctatcattctgcaaaccaacacttcagagattacacatttttttctacatcttgccatgtgcttgtggagcaaacatttttttgcagtgaagcaaatgaactacatgtgggataccatgtttaaactagaaggcaccctgcatccctcaagattcccaattccttagagataagggatagagattgttggttgacttaaaaaaaaaactctttattaactctaacattaaaccatattgaattaatttactatgatttatttcaaaaccagatgtgttgataacttggtaaaaattgcttcagacagtatctgagcattttcccagagtactaaggagcaaatctataattcagggccactactatcatcctagttaaatatactttatctccttcttctaatcctagttggtattctcacttcctctcttccaaccttaactactcgtcttatttccctcaatggatcttcctttcagatttatgcaaatattatgtcatatccctgttaaaaaccctttactgcttcattcattctctgtattcttaagataaagtctaagaagcacaaatgatatgacttattttccagtatttcaagtgccattcaatccaattgtgctttgatatttcatctatactaaatatcttttatttctttgaaatttctgtgttctcttttacatattcaggtgttttcttcctctttttctgtggtaaaatcttactcatgcttcttatttcaaggtatacattacttcttcaaaaaagactgggctaggttttcctggaatctaataattatcttacataaygctcatcatactttaaaaaaaaaaaatctgcgtcttgtgcaatttgaatctgtccctagcaccattttatgtgctgctgcattctcagctctttcttttcccaatggttagcatttaacattcacttattcctaaatgctttactgaatgaaagttaaagtaatgtgtgttatgagttcaagctcacaccagacgttcctcatgggttatgcatgtatccttacaatttcagattctgtagcagtcaccttggtgatcccctccccacacagacattcttccttgacactgagcccacgagctgaaaaatacctgatatttttttgaagctacggcttagacatgtgacccaatcctggccaatggaccagaggaaaaaactggatgaaaagtatacttgtgaggagaaaatgtctttccccctattaaatacagttgactgagaacatgctttttggatctgtatttgccttccaacaactctgaagaatcaaatctgaaaaccaacgccaatcctgtgcagatgggtgaaaataaaatatatgatatgtgggcctttgatgatttaaattattctttaaataattcttgtgctgctgaattaaccgagcctggaaccacttacctctagtcaccttgttatataagataatacatataggttctatttcagccacttataagtaggtatctttttatttactgtcaaaagaaccctcactgatatagatgccctcaggacttgaccctccctgagttcctgttaggcagttaaggtaatcatctgttggattagggaagcctagcttatttacttctcagtgtggacaagtttggtctttaacttgtatgctcttgttttccaaaaaggagatagaccagaatcctaaaaaagtaagtctaaacattggtgtccttttacgcttcccatctaaattatctttaagaacatttaagtttcattgatgatccccaaaataattcaagcaaaatgctgagttggtagaatataaggactgttatttatttttattgtttttacagaccacataccctagggaattctgaaaacctgactaacatcaattgaagattggggttcaggaggcctagatgatccaccatgacttattcaaaagttgaagatgaaaggaaagaataaagactctttycatscagttctctagtctgaaaggaaaagaaataggcaaaggacagtaggcttttctatatcattatattcattcaaatgattctcttaaaataataatgaactaaggaggctctgtaagcaagacaaacggtcaggaggcctccttgctccaagaatactccctttttactttattaaaatggtttgtaaaggtaaactaaattgactaaagtatcaatatttccatatatgcgtgatcttttagagaccataaactgtcagtgtattaggctgttcttgcatggctataaagaaatacctgagactaggtgatttataagaaaaggggtataattggcccacagttctgcagactgtacaggaagcatagtagcatgtgcttctggggaggcctcaggaagcttccaatcgtggcggaaggcaaagggaagcaggcacattgcatggtgagaacagaaacaagaacaaggaagggtggctgggaggcgccacataattttaaattaccagatctcacaagaactcactatccggaagacagcacccagccatgagggatccaccctcatgattcaaacacctcccaccaagccccacctccagcactggggatcacaactcgacatgagatttgagcagagacaaatttccaaactatatcactcagaatctggaatagaaagagtatgcaccataacacttttattctctacagaaacagacactgtgctgagctcaaaaaatagtgattcatcaaatatgaatgtgcaaacctcttttgtactgtatctgtggaatcctggttactggggctttgagcccctgtcccataaaatctctgtaatactaacctaactcatggcatttctttaaaatcaaatttaatgaaatgatggacataaagcccatggaactgagtgtgtaatcttctcttatttgattagatgttaaacttgaaacacttttttttgataaaatatgaaatacataaatgagttaaattgttgtgactttccttataagattgaaaacaataaggtgtttttaatactttttttctgtgttctcttgaaagtagctttacatgtattaagcaatcytggctttagatattagggacaataaaaatttctgcaattttcccagttttatatagccattgtttgcaagtatgaaawcctgtcttttgttactgaaatattatcttttattttggcttttttgataacttttatgtttgccttgagcaagtcacttatcttttctatttgtgttttctatttcagtttatttatgaaagacagtaataatgattgtgatgtaccttacaaaaaaagataaaatcgtattgaagagactgttgaatatgaacgcagtgtattaaatgcccgatataggaacaaaaataaaatgaagaacatttctattataaagtattttcctaaatagatttagtactgtgaaaggcagtaaaattatttcctgataaacactttcttgagtattcaaggattaattgcccaggataagaaaaaatccagtcttgattatattgcatatttcctggtcggccttcactgaatagttaattagaataccaccaggaggcgtcttcttgggtcatagatggaatatatttgtgggcaaaaaatatttttccttaaggaatttgtagactaatctaaggaaataaaaatcaattttaacttcaaatttcagcctaattagaagacagtagatcactcacacattcattcattcattcaattaatatttattgaactccttctctgtgaaaattattggactagatgatttgagacgtacaatgacaaaatatgacttctatcctcagatcttatcgttaatagggaagtgaagaaatatatttaaaaaactctattaaggcttttttagtgggtgttgaaacaaaggcagggaaagcagttatgaatatttctaaccagatataaaggcagtggcaatgggaatttaaggaaatgaatgaattaaaataattttcggtgaaaaaggggattgtttgtcagctgcatatggaatgttgggagaaggtgagaagtcaaggacagggatttctttcttttctttctttcttttttttttttttttgagacagtctagctctgtcgcccgggctggagtgcagtggcgcaatcttggctcactgcaagctccacctcccgggttcacgccattctcctgcctcagccttccgagtagctgggactacaggtgccagccatcacgcctggctaatttttctgtttttagtagagatggggtttcaccgtgttagccaggatggtctcgatctcctgtgatcgagatcccccctcctcggcctcccgaagtgcgttttgagacggagtctcgctctgccgcgcaggctggagtgcagtggtgcaattttggctcactgcaacactgtaacctctgcctccctggttcaagtaattctcctgcctcagcctcccgartagctaggattacgggcataggccaccatgcctggctaatttttctatttttagtagagatggggtttcaccatattggccaggctgggggatttctggtttcttctctaaaagctaaaaagcttggaaggcattactccttccaagcttatttattccttaaaataagaaaaatttgaacaaactgaaaatcaacaatatttcttgggctcatcagataaattaggacataaaactaactgctactcccaaatctagaaaggcaggcgaytatagagaaaagcagctaagatccgtttaactrcagcagaagtcactgaaaccataaactggtagggacacttaaatggtaattccgatgaagatctgactgaatgctgagtgtggactagcttgagagtaagaaactcctggggatcacattcttagggaatcccgcacactttgatgactctcacctctagggatcccatcaggttcttacggtaaggaactaagaaaaagcaccttttgtctttgtcagggatggggaaaagtaaccatctgaaatatgcctagagaattctctatacataagcctcttccaaggagaaaamactttacyagtcaaatatttatctcaccaaggagaaagaattcttactgaattccaggcctctctaacctttctgtccacattacatagaagaaataaaactgtgatggttaattttataatatgtgccaatttaatacactaagaaagacacagcccagggatacaggcccacttaagaccagctgtaattgtaagattatagaatgttttccctccccaactttttaacaccacatcaacaggactccagtataataagtgaattatagcygagagagctggaaagcacatgctgcaacttasaaaaaaaaagaaaaaaaactcattaatacaagaatgagagtcaggaatagtagtcagaatcacagaatttttgttgctatttgttgtcattacatttatttattgaaaggtaaaatattaagccagtttaaagactgagataaataggagagagtaaataagctaaaagttactccaaattagaggactttccttatgtagtagcattctgagtgaagaagtgctcaaccttgcccatactgttcctcgtttcatatgcacgtgactagctgaataattcttgaaaaacctgtcttttccccatcatcctggataatggaaagtgttctcyatatgaagacaatttatagcacactgtgattataataacaaatagcataccagttatcataaatgcatatgctgattttatatattttggtaatcattcctttattcaactgattttcaataacartgtgttccaaaagtgaggttacaaggatgaaaatgatgtgttctaattcacatctctagttggttttgataagcctggagctgtggaatgagaaggagtgggaggggactataaatctttgaaatgcttcccagatgatttagaaaaaatttacttccacaccctactgaaaactacctatctagtttgttatgcatatacctcagtatccatatatttcactacatttgacccttgaacaacaagggagatagaggcaccaaccctcatgcagttgaaaatccatgtataacttttgatgcccctcaaccttaactactaacagtctactgttgactagaagtcttactgataacataaacayggttgattaacatgtattttgtttatgtattatatactgtattcttaaagtaagctagagaaaagaaaatgtttttaaggaaatcayaagaaaragaaaatatatactattcattaagtggaagtagattatcataagcatctttatcttcatcctcgtcacattgagtgggctgaggaggaacaggaagatgaagggttggccttgctttctcaggggtggaagaggcagaagaatattcacttataagtggatctacacagttcaaacctgtatattattatttttgagatggagtgcagtggcatgatctcagctcactgcaacctctgcctccagggctcaagggatcctcccacctcagcctcccaagtatatgggactgcagggatgtaccaccatgcccagctaatttttgtatttttttatggagatggggtttcaccatgttgtccaggctggtctggaactcctgggctcaagcaatccaccctccttcgcctcccaaattacaggcatgagccaccacgccsagcccaaacctgtatgtacattaagggtcaactgtatgtagttttcttgttattatgttataatcctgtgacttgactggctctctttttaagatgctagatgttgtgcagctggataaagttcaagtggcaatggaagaacaggaatcatatttacattgataatcaaagtgaatagaaaagtctattactttcaagataatataataccattaaagtgcaaatctctcaatgtgacaaattctgaaaaatacagtttctatgttcgagcaaaataatttgacaattattgacagaaataaggtaccatttacctttatgaaatgttagtttctaaataaatctcaatccaatgccaattaaaactatacgtttaatttgtatgttttaataagttgtcaatttttttttacaatgttaacattttagtagattttacagtaacatctttttgaactgtgactgtgttttttaatttaatgaacaaaatgagtattgcttttctacttgtaaagtgttattaatatccaaaggattaacaaatgccatttttttctgcaattgcttgttatttaggctttttcatcaacatttgttatgtagcaaatactcatatagtttgcattttgtggagctgagaggtacttatgtaaaattgtttccaaactttaccttctccctattytctaaaacaaatttctggcctggtcgacttcaattcttttactccgtagctacagtctgaatggggctgagggggattcttctttgtcagatactttctcaagggctttcataatgcagaatcaaaaggaaagctgggcagatagaaagacgatggctcctaagcaatgttctgtagggcacgtggaagcgcaactgaagtgattcaaggaaactgatagaggagaaaagggcaatattagaaactactgtggtgaactatgtgttctaataatgatgttcaagatatacaaatgaagatcttcagttgttgtgaattttcttttttggtctgaatattttctttggaacacagtaatactcagaaactataacatggttccaataggttatatgattactaaatatctcttaataaatattttatttcccagataatgtattttttctagtacttagagcctttaatactgtaatcattttactcaaagtttagaaattaaaaaaaattaaatcacacataaatctaaaactctagtaaaataattgtcataattttgcatattttcaggtttttcatttaaaattccatttacaaacaaagtgtattttccatttaccacatggacttttgtgtacagaaaatctctctgtttttcctctactctcataccacagcgatcaacaatgaagacatctgtgaccaaatgtgtctgtatggtgggagggttccccacacagagcagcagacaccagctgggtatcctctaatgcaattctgatgctatcttcctgaagatactgtcagatccaatagattgggggctcattccccaagagtcctcttcagacatcarttgcaagtctggccctctgaacatctgagtgaccagcttcaagctgaggtttctataaccccmtttttgtgttggattaactttctggagtggctcacagaactcagggaatcactaacttaatttaccagtttattataaagaatattccaaaggatacagatgaagtgaccatagagtgaggtatgggggaagggacacagagcttccttgcccaccctgggcacgcctccttctaggaactctacaccttcattcagatatcctaaagctcttagaacttagttctcttggatttttatggaagcattccttcctccaggatatgaggtgggaccctctcaggggaaggacttaayacaattagaaaagcaggggaagattagagtcctgccccaagaaagaaaggagagagattctgtttcctgaggcctttccctgagatctaatgcacccattataacaaaagactgtagcaaaggccacggagttatgagccaggaactgtggatgaaaaccaatatatattcaatcataacactacaactttgtgactatttttttgaatgcataattttcagtgaaaacatttactatcattgaataacaattttttaatkgttgtttacttaggttgctttcaacatttagacattacaatgctggttatctgtcatgtggcctctagttttcagtcttcaaagatgttttcttttaattaataaggcacagatggaatggagatcgagtatgtgtagcagggtatttattcaaattttttcccatgtctggaggtgatacttctcttacaacttgattatgtgtgaaaaggaatttgaacaattgtatgtctccatgaacttcatcatgtactgattagaggtcaaagtgaccttgaccttgatgagattgtctagacattttgaccggcattttgactggcattgtctagatattttgactagaaagtggtgacgcttccyaaatgtggttggtggctgctcaactctctacaagaagtagggtccaccacagtaagttttgcagtttatctgaatgattagatgagtatmgtgtgaaggttaaactactgctacatacactgacttaagtaggcagctgcttatgaatcaagttgtgactaaaatatgcacagataagggtactttatttttataacttaaataaaaaacctattactattatattagaaatcctgataagcccatcaatttctaatattatcctatgttagaaataagaataagcacttggagagctttgaggtgaaagactaaggtagaaaatgatcatgggttatgtactctatttttttacatccattcttctttttcttttttcatttatcagttattgaaaaatcagatatcaactcaattacttatatatgatctataaagtgtagccattgaaaattatgggtgtgtctatgtattagtttcctaargctgtcaaaaaaagtactacaaacaaactgagtggcttagacaatggaaatctattgtcacagttctagaggctagaattctgagatgaaggtgttggtaggaccaagcatcctttaaaggtgctagggaaggatctattctggacctcaagcctggtatctggtagtttcttggtttgtgatggcataactccaatcttcacatggtggttccctgtaggtgtcctttgtgtccaaatttcccctttttaataaggaaactagtcattgtaaaaaggctcacttccctccagtattttctctttttaactaatgatgtctgcaaagaccttatttccaaataatatatcctgacttaccaggagttgggacttcaacataggaattggacagggggccggggagaaacaattcaatcattaacaatcaattacatagttaargttcattagaaaggcgatcctttatcattgactgactcactgtcaataaaagattagtttatttccttggtttacagatagttctctgcctagttatgtactgaatctcattctttcttaacacctgaaagattttcctcccccaggcattcctctttccctggtatttttaaatcactggatcattttcatcagtgtttaaacttgattaagcttttctatctaacacatacacacacacacacacacaccatctcaatcttgttaacaactattctgttcacaagtttattgaaagaagcttgccttctgataattatgtagttggtagctcactactttttactttcagtttatttctgaactctctgtaatctggactctgcttccaaaacaccatccagagcagctttgataatgtcaacagtgacttacttttttaataagcctggtgaaaactattcagtcttagtttatttcctctctgttatgtctaacataattgatctcactctccttcttaaatttgtttgctcccaaagctattgtgacaccctaatttattttttctcttttgtttgttttcatttttcttcacaatcacttttttgtttttcaactgtttattttctactacatgaatatcctagtgattctcaaatctccattttctgatcagatatttctcttttgagctcatactcacgtagccaatgtctactgatatggtttggctctgtccccacccaaatctcatcttgaattgtaactcccataattctcacttcccacatgtctttggaagaactcggtgggaggtaattgaatcatgggggcacatcttttcctgtgctgttcttgtaatagtgaataagtctcatgaaatctgacagwtttaaaaaggggagttcacctgcactagctctttcttcttgcctgctgccattcatgtaagatgtgacttgctcctccttgccttctaccatgattatgaggcctccccagccatgtggaactgtaagcccattaaacttcttttacttcctagtcttgagtatgtctttatcagcagcgtgaaaatggactaatacacctactatatttcttcggctggattttataaggaacatttcaattgaactcattatatattttaccttaaaattccacctgaaattttatttgctctcaacaggagtgagcartacttccattccactagtatacatgccaaaacataaagttattcttgactctcccttctcatttgcctctctctactccacccatatctgtagagtccatcttctaagtagctttcaaattcacctccataacccatcttagtttaaatcttaattatttctgtgtgaattattaaaataacctttttaacagtctttagccttggtcctatgcagccttttctttataatatcctcagcaaactactgcaggagtaatttatactgtacccagagtaaactgcataaatttaaatatgattataattttccatgattaaaatttattattgatataccatagccttctgaataaaacataatttattgttatggaataaatgactatgatttggtttcttttggtttctctttgccaaggtatacctctccacataagtatactaaaatacttgttccccaaactcttgcctccaggaattttaatgttcctacctttgcttagaaaatacttggctttcttttatcttttrctaattccttctgaccattgggattctggatacattttttttccccccagaatgctttctctgactctactaccttggtctatgtgtttgttttcttttgctgtgaggcaaattactacaaactggaacttcccaacaagtttctcatctccatctgagaccacttcagcttgcacttcattgtccagatcactatcagcattttggtcaaagtcattcaacaagtctctaggaagtctcaaactttcccacatcctcctgtcttctgagccctccaagtctctaggaaattccaagctttcccacattttcctgtcttcttctgaggcctccaaactgttctgacctctgcctgttacccagttccaaagtcacttccacattttcaggtatcttaatagcagcaccccactctctgcagtatgaatgtactgtattagtctgctctcatgctgctatgaagaagtactcaagattgagtgatttataaagaaaagagatttaattgatccacagttctgcattgctgtggggggcttagggaacttacaggcatggcagaaagcacctcttcacagggcagcaggaaagagaatgagtgttgagcgaaggaggatgccccttataaaaccatgaaatctcatgaggacttactatcatgaggctaccatggggggaaactgtcccaatgattcaattacctcccactgggtctttcccatgacatgtggggattaagggaactacaattcaagatgagatttgggtagggacacagctaaaccacagyagtgggtaaaatgccatcaaaccacattgcatgctgcagagtaatcttttgtggaaagaagagtcaacaaatgtggtaaacttcattctcttactttaagaaattgccacagccaccccagccttcaataaccatcaccctgatcagtcaacagccatcaacattgaggcaagaccctccaccaacagaaagagtacaactctttgaaggttcagatgattattatttttaataacatatttttaaataaagatacacacttttagccgggtgcagtggctcatacctgtaatcccagcactttgggaggccaaggcgggyggatcacgaggtcaggagatcaagaccatcctggctaacacagtgaaaccccatctctactaaaaatacaaaaaattagccagctacttgggaggctgaggcaggagaatggcttgaacctgggagttggagcttgtagtgagccgagatcgcgccactgcactgcagcctgggctacacagcgagactgtctcaaaaaaaaaaaamacacacacacrcacacgtttataagatgtaatgctattgaacacttaataggctaaagtataggctaaatgtaagttttatatgcactgggaaacccaaaaattcatcaaaataaaacagtttattgtgatatttactttrttgcagttgccttgaaccagtcccacagtatctcagaggtatgcccatatatagtattggtttatgttgtgtaactataatctgtagcttcagctaatgttcattgccttcttgcagttcagttttttgactttgcagaatccctgataccagtgtttaaggtgagtcatattatctgtaattcctgcacagcacaatgttgacatctctgcttttttttctcttggaaattttatattgatgctcgagtccatgaaacatttctgaagcgttacttatttttgtattcttcttcattgtcacaattcagcaccccataaaatagggtactatgtatattttaggatctgccagtattaggaaagtcttttctctctagtttttactctcctttgttatcatataaaacctgaagggctttactttctcttttttatctaaaaactgcatatgtattcccaagcactgcccaatgttattcacgctgtcctttccctgtgtctgaaatgtacagggccccagagatggctcagcttctttcttccaggaggatggcagaagggtgcctactacctatagcaaagcccttgtcagcactgtgtcctgtgagatttagcgattcttttgatgatgtgacagaatacatggacactcagacagataaaaggcagaactctttgttacttacagctcaaaggaaagaaggctgccctgtaggaccatgcaataggttgcacgtcggggcaggatagcagcaagctggagctgagggtggcagcttgtgccaggcaggcaaggtgggcaatgcctagttgaacagatttcctgtggctagactaatttagatacttccaagggctctggggaataggggctgtccctagttgcctggtacttggcctggtggatggagtaaaggggagtgctgatagggctggtacctggagtgtgagagcctgataagggaagtgtttggagtgcagatgtttcagctgataaagaaggggtaataactggactctggccaggcctcaaaactgggtcaaggcagcatttaaaaaataaaaacaaaacaaaacaaaaactgtgttacacacttctagaaggtaatggagatgtgtttgatgtctttgaataccttttttctaccaagaaagtaagttcatagtgatgttcaaacataatttcttactttttttttcttttttaaatttaactttcatttaagttcaaggatacatgtgcaggtttgttatgtaggtaaacttgtgtcatgggcatttatggtacagattattttgtcacccaggtattaagcctagtattcattagttatttttcctgatcctttccctcctcccaccctgcagcctccaataggccccagtgtgtgttgttccccactatgtgtccatgtgttcttatcatttagctcccacttataagtgagaacatgcagtatttggttttcttttccttttttgttgaggataatggcctccatccatgttactgcaaaggacgtaatcttattcttttctattgctgcatggtatttcatgatgtttatataccacattttttctatccagtctgccattgatggacatttaggttgattccacgtctttgccattgtgaatagtgctkcaatgaacatatgtgtgcatgtgtctttataatagatttatatttgtttgaatatatacccaggaatgggattgctgtgacaaatggtatttctgtttttaggtctttgaagaatcaccacastgtcttccacaatggttgaactaatttacactcccaccaacagcrtataagcatttcgtgtcctctgcaactttgccagaagctgttattttttgacttcttaataacacrtaccattctgtgaggtggtgtctcattgtggttttgatttgcatttctctaatgatcagtgatgttgagcttttttgatatgattgttkgctgaatgtatgtcttctttttgagaagtgtctgctcatgtcctttgtacactttttaatggggttgtttttgtcttgtaagtttgttttagttccttacagatgctgggtattagacctttatcagatgcatagtttgcaaaaatattctctcattctgtaggttgtctgtttactctgttgatactttcttttactatgcagaaggtcttttgtttaattagatgccatttgtccatttttgcttttgttgtaattgcttttggtgttttcataatgaaatatttgcccatgcctatgtcctgaatggtattgcctaagttgtcttccatggcttttatagttttgagttttacatttaagtctttaatccatcttgagtagatttttgtatatgatgtaaggaagaggtccagcttcaatcttctgcatatagctatccagttatcccagcaccatttattgaataaggaatcctttcaccattgcttrtttttgtcagggttgttgaagatcatatatttgtagctgtgtggccttattactgggttctctgttttgttccattggtctaagtgtctgttttgtaccagtaccatgctgttttggttactgtagcctgtatcatagtttgaagttgggtagcttgatgcctccagctttgttctttttgcttacaattgcctttgatattcaggcgttcttttttttcsttgttccatttgaattttaaaatagcattttctggttctgtgaagaatgtcagtggtagattaataggaatagcattgaatcagtaaattgctttgggcactatggctattttaatgatattaattattcctatctatgagcatggaatgttttcccatttgtttgtgtcatctgtgatttcttcgagaagtgttttgtagttctctttgtagaggtctttcacttcccttgttagctgtatttctaagtatatttttgtgtgtgtgtggcaactgtaaattggattgcattcctgatttggctctcagcttgacttttattggtgtatagaaatgttactgatttctggctgggtgcggtggctcacacctgtaatcccagcactttgggaggcagagggtgggctgatcacaaggtcaggagttcgagaccagcctggccaacatggtgaaaccccatctctactaaaaatacaacttagctaggcgtggttgcgggcacctgtaatcccaactactcgggagactgaggcagaagaatcacttgaaaccagaaagcagaggttgcagtgagccgagatcgtgccactgcactgcagcatgggcaacaagggcaaaactctgtctcaaaaaaaaaaaaaaaaaggaaacaaagaaatgttcgtgatttctgcacattgattttgcatcctgagactttgctgaagttgtttatcagcttaaggagcttttgggctgagattatggggttttctagatataggatcatgctttctgcaaacagggatagtttgacatcctatcttcctattcggatgtcctttatttctttctcttgcctgattatcctggccaggactttcaatactatgttgaataggagtggtgagagaaggcatccttgtcttttgctggtttttcaggagaatgcttccagcttttgcccattcagtgtagygttggctgtgggtttgtcatagatggctcctattatttttaggtatgttccttcaatacctagtttatcraaagtttttaacatgaaagagtgttgagttttattgaatgccttttctgcatctattgaaataattatgtgggttttgtctttagttctgtttatgtgatgaatcacatttatttatttgtgtatgttgaaccaaccttacatctcmtggataaagcctacttgattatggtggataagcattttgatgtgctgctggatttgttttgccagtatttttttgagaatttgtgcatcaatgttcataaaaaatattggcctgaagttttttgttgttgtgtctctgccaggttttggtgtcaggatgatgctggcttcatagaatgagttagggaggagtctytccttctcagttatgtgggatagtttcaggaagaaacatactggctcttsctgtacatctagtggaattcagctgtgaatccatctggtcctgggcttttattgttttgaaggctatttgttattgattcaatttcagagcttattattcgtctgttcagggataccatttcttcccgtgctcagtattgggagggtgtatktgtccaggatttattcattttttctagattttctagtttatgttcatagaggtattaataatattttgatttttttttgtatttctgtggggtcagtggtaataccttctttgttgtttctgtttatttggatattatctcttttcttcattagtgtagctagtggtatatctattgtactaaatttaaaaaaaaaaaaaaaaaacagctcttggatttgtggatcttttgaagggtttttcttgtccccatctccttcagctttgattttagttatttcttgtcttctgctagctttgtgatttgtttcctcttgattttctasttcttttagttgtgatgttaggttgttaacttgagatctttctaactttttgatgtgggcatttagtgctataattttccctcttaacaccaccttatctgtgtcccagggattctggtacattgtgtcttttttctcatttatttcaaagaactttctgatttcttcctgaattttattatttaccaaaaagtcattcaggagaaagtttttcaattttaatgtaattatatggttttgagttaatttcttagttttgactactaatttgattgtactgtggttcaagacattgttttttatgatttcagttcttttgcatttgctaaggagtgttttactgctactgattttgttatcaattttagagtatgtgccatgtgacaatgaaaagcatgtatattctgttcttttggggtggaaagttctgtagatgtctattagatccatttgatccagtgctgagttcgtgtcttgaagatctttgcttattttctgtcttggtgatctaatattgtcagtgggatgttaaagtctcccatgattattatgtgagagtcaaagtctctttgaaggtctccaataacttgatttatgaatctgggtactcctatgttgggtgcatatatatttaggttagctagatcttattgttgtattgaaccctttaccattatgtattgtccttgtcttttatttttatatttgttggtttaaagtctgttttggctgaaactaggattgcaaccctacttttatctgttttccatttgcttggtagatttttytgcatccctttattttgaacctacgtcattgcatgtgagattagtctcttgaagacagcataccaatgggtcttctgattccttatccagcttgccactyggtgccttttaactggggaatttagcccatttacattcaaggttaatatggatatttatggatttgattctgttatgatgttaactgtttattttgctacttgtttatgtggttgcttcatagtgtcactgatctgtaatttagtttatttttgtagtagctgctaatggtttttcctttctgtatttagtgcttccttcargagctcttgtaaggcaagtctggtggtaacaaattccctcagcatttgcttgtctgagaaagatcttatttctcctcctcttatgaagcttagtttgacgaggtatgaaattctgggttggaattcttttctttaagaatattgaatataggccgccaatgtcttttggctcatagggtttctgctgagatgtctgctgttagcctgatgggcttccctttgtaggtgacttggcctttctctctagctccctttaacattttgttctttcatttcaaccttggagaatctgaagattatgtctgttggggatgatcttcttataaaatgtgttattgtggttctctgcattttatgaatttgaatgttggcctctctaggtaggttgctgaagttctcatggataatactctgatttatgttttccaagttggctctattctcctgatatttttcaggtacaccaaagagttgtaagtttggtctctttacgtaatgccgtatttctcagaggttttgtttgctcattttcattcttttttctctatatttgtctgactgccttatttcagaaagtcagtcctcaattcatgagattctttccttttcttggtatattctgctgttgatacttgtgattgcattatgaaattcctgtagtgtgtttttcaggtctatcatgttggttacattattttctatattggctattttgtctgtcagcacctgcattatttatcaggatttttagcttccttgtactggattttaatatactcttgtagctcagtgatcttcattcatatccatattctgaattctatttctgtcatttcagccatctcaccctggtttagaacctttgctggagaggtgatgcaatcatttggtggaaaaaaaggccttctggctttttgggttgacacagttcttgcactgattctatttcatctttgtgggcttatctaccttcagtgtttgatattgctgacatttgcatgggtttttaaaaattcttttatcctatttgatgaccttcagggtttgattgtgacattacgtggattcaactgactggctttgtttctggaagattttaggggrtcactgcttagcccccaactcctggactatgtgctctcactctgggggcttgtattaagccctgactttgttctcttggctccttgatgttaggaacccactgcactgaggtggggggaggcagtgggtggtggcggaaggtgctttcagaccacaggtcacwacactctgatgggtggtgccagccaaagcattttttagtgcagtaacagtaggatcagtcctcgttctcacgtgctagcagcaacagtagtggcagctgcagcagagtgccagcaggtgccatggttcctgcctccyttcaggcattcaccacagtggtgaaggcaacacagcttggcggtgaggggggtctctgttggcaactgtgtgtatggtcacactggaggtgatgttggctcaggggtggggtgctggtaggcacaggtctgggtgtcttctctgtgtcccggaaggtggagtggtcactcagtacgagggaggatctgctgttcactgtgcagtaktagcacaagggcagggtgctggcaggggagaggttggctggttctgtgcctgccaaggctstgtctgctctgcaatggcagttggcggagggtgggggacagacagtctgtgaggtaagcaaagaaaaatccatctgggcagacacacaccagccaagtgatgtgggaccctggggaagctacagtatgggragagagtgtgcaggctggtgtgtggccgtaggcgtcgtgcyactggagctctctgcagctcaggcacaatccaccagtgcagaagctatgggctcccaagtaacccgagactgccctgcaagcagtcatggccagtctggggccccaggagaagccagaagactaaggggtgctcaggtcgcrcaggccccatatgatgggcaaaactgcctgacagagttcaggtccagcagttccccatgactaacgtctcctatgggagcaagtcaaaccaagggggtggctatccctggcaatattctgttacacatgctcccacataaaaacctctggactccacatcagctggcttgctgtccttaacacttctttaagcatctctccctgccaacacaagtgtctgtagtggtcaacggggctcctcctgccagtgattcagaggcccatggtgagagcagactgccccttgccagttcaactgacccattccctgggagccactgggggccaggaacaagtcctgttgcacgctggacccgtgcagagttccgagctttctcctgcttcagcccagcttctgtgtcttccttctgtccactcttggtgccttccctctgaaggcytgttaggagcatgccagtcatcttggtcccttggtggtgctgtttcccataatttcttaatttaggaggtttaggtagataaatagataaaatttcctttaytcctatgtaaaacacaaaaagccagtaagcatgcttcataacagaaaggaacttttaatataatgttttaaaccattttttcttttcttcttcttatcattattattttttgtagagacgaggtcttaccatgttgcccaggctggtctcatactcttgggctcaggaaatcttccgccttgtcttcccaaaatgttgtgattacacacataagctctgtgactrgctttttattttttatttttttcawgtgtagtttacattgtgggaggagacatgtaaacaatttcttaccttgcttaagaaatacaggtagaatatggcatttcctagctatctcctctgggaaacaaaaatgctggaatcaagagactctcacaacctcttaaatgcattactttctcctaaaatgtcttatcaagcaatgccagtgagacagtgtaagttatcgctttatcacttgttgactgtttctgttaagaagctcattgttgataagtttgtaaagcgacttatgtcttaaatatagttccaaatcgatttttaatgaaacccatgggttttaggagatcagaaaactaatttatgttgygtagtaactcattctatgaccctgrgaaatttggttctcattcttctacatgcaaaatactgtcattttaagatagctttagaaaagtaaataccaatgtttatttttaaattttaaattttatgaaagaattggatcaaacaaaaaaataaggaaaracttgagtagtgtttttataaagataggttgaaatgctctgttctcttactgtataatcgaaaaaaatcagtaagatgggctacattacattagaaaagttgtacaacctcattattttttattgttagttcaaaaaaatgaaacaaagaggacactaacaaattrgaaatgacaagaacatagtctcatggaacttttttgacatcttaacaaatttatcattgtaagctcatgtttttaacttttccaaaaaatgtaggacttcagtgaattttgttgagaggctgatgaacactttcttggtattatgatatatgtttttcttttatttcatctttgctacaattactttctctgcttactttttatgtctgaaaccctacttattctagaaatgtaatatgttttcaataacaaattaagaaagattgtgatagtaaaacatagtttwgtacaaargagtgttttttaaatgataaagcctctrtacaaatgtaaggtggtattattattttttgaaagatttatatcggtaagaatttttaagatattctaagagtaccattcattgtcgaaaagattatgctgatatccaaacattcttcctcaattgcttgaaaatcttaggagatatgccactgtatcaagagacaatgctatttccttatttgactaatatgctaaaaaaatasatttctaacatactggctttgaacaactgttttctcttgaccatcccgtaaaagataaattattaataatttcaatactaaattaataaatgccatttactttgatcatggatatattttaaaattacattatagtttgtgttttatttgtaaacttcatcaacatttcatataaataccagagaaaatcagagtaaatataatgtctaagaatcatttgtttagttttatttcaaaactgtaaaaaagacttagaatatacaatctatgctattgtttggtaatatattttttagttctttagaatatatrtataattctaggctgggggcgttgtctcacgcctgtaatcccagcactttgggaggccaagcggggtggatcacgaggtcagtagttcaagatcaacctggccaatatggtgaaaccctgcctctactaaaaatacaaaaattagccaggcatggtggtgggtgcctgtagtctcagctacttgggaggctgaggcacgagaatcgcttgaacccgggaggcggagtttgcagtgagccaagatcatgccattccattccagcctgggcaacagagtgagactccatctaaaaaaaaaataaattaattacaaatatataaatataaatatatataatatatattatatgtaaatatatttatatgtatatataaaattctgtgggtaaactatgtgaattttacctctagtaaatgtagttgtataatcagtaaagatatcctaaaaatattatgcttttaaaatttttaaatagtatttcaatagtattcatttaatagtatttaaatagtactcatttaaaaagtacacttactgtaaatcaatggaatgttaatctcttaagtgagcatataaagatagatctacaatgaatttttagttaatgtttataaaaaaattttatagcatcaagtagtaattattaatgctgaaatgatatataaaatattttttaattgttttgcgctaactaataaagaaacaaaattgtggttttcttaaccttgttttcagtatttgagaagcagtgcctcccatggacctatttggatgagtatatacctccactgatttatttcactagctacccaggtgttgcagacagcatgctactttgaaactaagtcaacataagaattatatgaggtcacttatttaggtagagcagaatatattgtcaatgattacacatcgttgtgttttctcatctctgacctctgtccttggccatattccttttttctttcttctttttttttttcacttgttcataaaattctgtccttgtttgccctgataaagttgtctgttttctttgttttttaatcttttgaattttttgtttataagaataaggaaacagcttgtaaatcttacagtaaagccctccagagagaagaccagcagtctacaaatacaaagaaagtcatgatgactcaatgtcaaacttgatgtgtttgagaagccaaaaattatgttcataaatttactggaggaattattgggaggtttgtgagaattagaaattattatttgttttttatttgcattttttaatgtttttgtctttttttaaattatactttaagttctggggtacatgtgcagaacatgcagttttcttacacaggtatacatgtgccacrgtggtttgctgcacccatcaacctgtcacgtactttaggtatttctctaatgttatccctcccttagtcccccaccccctgacaggccttgctgtgtgatrttcccctctctatgtccatgtgttctcattgttaaactcccactkattagtgagaacatgyggtgtttggttttctgtccttgtgatagtttgctgagaatgatggtttccagcttgttctatgtccctgcaaaggacatgaactcatccttttttatggctgcatagtattccatggtgtatatctgccacattttctttatccagtctgttattgatggacatttgggttggttccaagtctttgctattgtgaatagtgctgcaataaacatatgtgtgygtgtgtctttatactagaatgatttataatcccttgggtatatatctggtaatgggattgctgggtcaaatggtatttctagtcctagatccttgaggaatcaccacactgtcttccacaatggttgaactaatttacactcccaccaacagtgtaaaagttttcctatttctccacatcttctccagcatctgttgttttctgacttcttaatgatcaccattctaactggcgtgagatggtgtctcattgtggttttgatttgcatttctctgatgaccagtgatgatgattattttttcttatgtctgttggctgcataaatgtcttcttttgagaaatgtctgttcatatcctttgcccactttttgatggggttgtttgtttttttcttgtaaatttgtttaagttttttgtagattctggttattactcctttgtcagatggatagactgcaaaaattttctcccattctgtaggctgcctgttcactctgatgatagcttcttttgctatgcagaagctctttagtttaattagatcccatttgtcagttttggctttttttgctgttgmttttggtgttttagacatgaagtctttgtccatgcctatgtcytgaatggtattgcccaagttttcttctagaatttttatggtcctaggttttacgtttaagtctttgatacatcttgagttgatttttgtataaggtgtaaggaagggggtccagtttcagttttctgcatacgtctagccagttttcccaacaacatttattaaatagggaatattttcccyattgyttgtttgtgtcagrtttgtcaaagatcagatggttgtagatgtgtggtgttatttctgaggcctctgttctgttccattggtctatgtgtctgttttggtaccagtaccatgctgttttggttactgtagcatttcagcataatattattgttcaaaataatttayggattttacttgcttttagtttttgacatttgatttctatttagttaatagtcttaaacaatgrgataattccaaatacaggcaaaatgcattataaaatgtataagactggagtcaggaaactgaacctgggacaaactacccaaatttctgagtatgtggctgtaactttccgratttataaaatagaagtacaggaatgaaatcacttgtatgtaattttttatccgtatttcagattctttagtaggttatatcataagaacataaatattgctgatatacttgaaatgagctatttgaaaatcattgcaaatataatttaaatcacaaaaatcaaaaattaaatcacaaaatatttactttaaaaaatttactgtatgcatttttacacaactataatgacataatttacactaatctgaactataatagagtttgtctctatgtttagatgatcttgtaacaagttatttcaaaatttagtggcttaaaactataattttatttagttcacaattttctatgtcaagaacttgggaatgattcaactgggaagttctagccttgtgtttctcaggcagttagagtgagatgttagctgagactttagtcacctgaagactccaccagcctagatgtccaaggtagctcatactcacagtattcaacacccagcattcaacaccggttgatgttgggtgtcctttgggagctcagtgaagctgtcagtggaagcgccatgtggtttctgcttctcagcatggctactgggttctttctgcaaaggagtaacctcagaaggagcattataactgaccatgatggaaggmctttcctgatctaatcctgaaagtcatgcagagtcatcatattctattaatcattgcaagtcaataagactagccaagatgcaaggacaggaacattagactccacttttcaataggaatactagcaaagggtttatagctgtctttaatctaccacactgagttccatatttatggataattattgaattaagaaataatagaattgaattttagtycaaaaattaattacacttgaatgagaaagagaatgtcataattattaaattatatttttcctatcaatgaataatatgcatttttacaagcacagggtcaaattggttacattagcctacaggttaatggaataacttcattttgaataccaagaatattaaaatcctgttcattctacacatcaatatgatttctaactcaatagatcatccttaaaaatatgttctagaattttgcaaatacaatgagaattttgatgggttattgctatcaaccctcatttgagagtaagagttgtttaaaggctttcattttgcctgctagatagatattttaggttggtgcagaagyaattgcagtttttgttatatagtaatggcaaaagcytaaattacttttgcaccaagctaatatttatgtgaatgttgccactgtatatatacaactaaagacaaaatgctgggtagcaaaaattcatttgcaaagccattcatagagaagacttttataaattgtcttcttatggcatataataaatattttatatgtgttattccataaatgaatgtaaatgatatattagcatctatccagtttaatgtggtgagattgtgaactccttcagaaattttcctgggaataaaatctgagaattttttaaatgagcataattttggaaaactgagtttctttgcagttcctagtarccacaatatwgggaaatgttccattttaaactatttaattaacaaaatgttaattaatacaaaaatactgttgttaattgttcaacaaaaacaactgtagtagatataggccaaatctcagatcccatctcaataaaggactcactgaccagcttccaggagtgtggctagcccactacagcattagctttttcaagggtcagcctcagctctccagatgaagttcaagctcatcactgggtgatctgaagcaaaggctgagatctagctattcatgaggcactccccaaccaatgagtgaayaagggagtagtacaagagccaacccacttttgctcaacagggggatttctgtaacaggaaatcttagctatgagcccctcatttgrctcatagagaatttgttagtaggaatcaaggtttgactgtcccctactcaatcctgaatcctcttcttttttttttttcttcacatttcctttcctttcccttccttaataaactttatgtatccttaactccatttgattcctggagaaccaacttgtgacattttattttatgaataaaattaacttttcttaagtgacatattatgcaagactttggtaatataagtagtaatacaatagagtttttgtcgtaaggtggttatagtttggtgtcatcatcaacctccacagaaatttccatgggactaaagaagttaagtaactagcacagaactacctggctagttacttgtagcatccaggatttgatcctgtatctctctgattgtaagaatcatgattattatcttacctgcatcctactatgctaatattaatatttcctttgcaatrtagagcaggtaaaaccttttaccattaacagtaatatttagagtcyaggagtataagtattaaaaatgagtataatccttgtccataatacccaagatttggggaagaaattggactactgtaaaagaggtggaacagaaagagttaataagcatcttccttgtagtcaagctggttgtcagcaaatgaaaagatatattaataaattacaactaagctaggtgtggtggctcacacttgtagtcctacctcttcaaggggccaaggtaggaagttygaggccagcatggacaacataaagcaactccatctcaacaaaatattttaaaagtttctgggtaaaataatgaccatggtgaaaatcgaatcaagaactcagtctcatttacatttgcaaaaaaaaaaaaacttaygaatatacttaaycaaggagatgaaagagctctgtaaggactataaaacactgatgaaaaaaatcatatatgacataaaaaatggaaatacatcctatgcttaagctcatggactgttagaatcaaaattgtgaaaatgaccatattgtccaaagcaatccaaagattcaatgcaattcctataaaaataccccaacgtcattttttgcagaattaggaaaaaaaaattttaaaacttatgtggaaccaaaaaagagtgctaatagccaaagtaatcctaagcaaaaagaataaatctggaggcatcatattacttcaaattttactacaaggctatagtaaccaaaacaayatggtacctgtataaaagtagatacatagaccattggaacagaatagagaacccagaaataaaaccaaatgcaacagccagctgatctttgacaaagccaacaaaaacatacactgagcaaagaacaccctattcaataaatgatgctggaaaaattggatagccagatgtagaagaatgaaactggatccctattctcaccatgtacaaaaattaacsgaagatggattaaagacttaaatctaagccctaaaaccataaaaattatattagaaaacctaagagaaacrattctggacattggcttaggcaaagaatttttgactrtgaccccaaaaacaaatgtaacaaaaaggaaaataaataaatgagacctaattaaacttaaaagcttctatacaacaaaagaaataatcaacagagtaaacagacaacttatagaatgagagaaaatatttgccacctgtacatcgacaaagaactaatatccagaatctacaagcaactcaaatcagcaagaaaaaaaataaataatcccatcaaaaagtgggtaaatgacataagcagacattcctcaaaataagatatacaaatggccaacaaaccatatgaaaaaatgctcaacatcactaaccagcagggaaatgtccattaaaaccacaatgagatgtcactttatccagaataaccattattaaaaaatcaaaagacaatagatgttaccatggatgtggtaaatggtgaaaatggaatacttatgcactgctgatgagactataaattagtacaacctctggaaaatattatggagatttctcaaagaactaaaagtacctctattattaaattcagcaatctcactactgggtatctacccaaaggaaaagaaatcattatatcaaaaagacatgtgcatgcatatgtttaccacagcacaattcacaattacaaagatatggaatcaatttaagtgcccatcaactgataaatgtataaagaaaacatggtattataagtcaggcacggtggctgatgtccgtaatcccaacattttgggatgctggggtaggaggatcacttgagcccaggaatttaagaacagtctgagcaacaaagtgagaccccatttccacacacacacacacacarttagctaggcatggtagcatatgcctgtagtcctagctactcaagaggctgaggcaggaggatcctttaagcataggaggttgaggttacagtaagctgatcatactactgtactccagccttggtgaagagcaagatcatacacacacacacacacacacacgcacacacacagcacacactgtggaatactatttagccataaaaataacaaactagtgaaagtattttgcagcaacttggaagtaattcaggaatggaaaactaaataccccatgttctyatttataagtgggagctaagctgtgggtatgcaaagccagagtgatataatagacactggagacttagaagcagggaagtgtgaagggagtgaggggtgaaaaattacctattgggtacaatgtacrctatttargtgataagtacactaaaatcctagacttcaccactatacaattcatccatgtaaccaaaaaccacttgtacccctaaagctatagaaataataataacaaaccaatgaaaataaaattaaaaaaataataaggtaaaaaaaaaaagttagttggatgtggtggtgcatgcctgcagtcctagctacttgggaggccgaggcaggaagattacttgagcccaggactttgaggttacagtgagccttgattgagccattgcactccagactactagacagagtgataccctgtctctaaataaatraataagaactatacattctttgtagttcagtatggaagaagtagaaattctaccatgagaaccagaataaacaggtattatgttttctctaatcctttagatgtttttggttgttgttgttccttgtcagctcagataagggtgccagatttcagagaaaatgggtatactgctgtttatactgcttatttggtaattgtattggaaaaaaacatgaatttgagcatcttctttttttcaaatagagatggtgtttcactgtgttacccaagctagtcttgaagtcctgggctcaagctatcctccttccttggcctcccaaagtgctgggattacaagcgagagccaccatggccagccaaatttgatcaccttatatgtgtcagttattatgtttggtgctagtaatatggtaatgcaatagaaactatatgctcaaatagggaataaaactagttcagtgaggccaggaacagtggctcatgcctgtaatcccagcactttgagaggtcaaggtgggcagatcacctgaggtctggagtttgaggccagcctggccaacatggtgaaaccccgtctctactaaaaatacaaaaaattagccaggtgtggtggcacgtgcctgtaatcccagctactcgggaggctgaggcaggagaattgaacctgggaggcagatgttgcggtgagccgagattgtgccaaggcactccagcctgggcaacaagagcgagactccctctcaacaacaacaacaacaacaacaacaacaacaacaaccaaaactagttcagtgaggttggggaacaagcaaacaacactttaagtattgcatgaaatgatgtatggtatggatgctatggagcattcccaaaggggtgtgccacttggccaaaaaggaaaatctttctagtgaaataaagagtaattcttttttttttttttttttgagacggagtctcgctctgtcgcccaggctggagtgcagtggcgcgatctcggctcactacaaggcccgcctcccgggttcacgccattctcctgcctcagcctcctgagtagctgggactacaggtgcccaccaccgcgcccaactaattttttgtatttttagtagagacggggtttcattgtgttagccaggatggtctcgatctcctgtctcctgacgttgtgatccgcccgcgtcggccttccaaagtgctggggttacaggcatgagccaccgcatccggcaggagtaattcttgagatgtgtcttggagcatgaggtattgtgagggagagaaggatacaacgggtagaaggcaataaaatccagaaatttgcatgtgtaaagtgaggagatgtgaaacaacattgcatttcagtgctgtaggaatgaacaaagtgaggaggttgaaagtcaaaaacttgcagctccggaaataagcaagtaacagttaatgaagggtacaatacactatgctgaagagttttgattttcttcctgaaggagaagatgattagctgttaaattaggaagtgacaaaattaattcctgcttagaaaaatctctctggcaaataaggaaagtgatagagataaaggaaaaatcactttagagacaattacagaaatttgggtaagaagcaacaagtacttagactgtcaatgtggaatggagaggagtaagtccaagaaatagtgaagaagtggagattaaatttggttccagatttggttcaaagtgagtagcagctgagcgtatatgatggcttcctgattattaatttaggaaataggaagataatggggaaatcagcagaagtgaagtcttaaggtggcggaagaggatgttgaattggagtgtctgtggaacaatattgagtatatgtttagtgagtagttgtacttaagagctggagcttggaatacagataattctggattagctagttgtatcttgtagttactagctgtattagtcagggttctttagagtgacagaactgatggaatatayatatmcacacacacacacacacacatatatacacttaataaactcacatatatatacacwtatatatatatatatatataaacacatatatatatatgagtttattaagtattaactcacatgattacaaggtccacaataggccatctgcaggctgagaagcaaggagagccagtccaaattccaaaactgaagaacttggagtccaatgttcaagggcaggaagcatccagcacaggagaaatatgtaggctgggaggctaggccactctctcttttcacatttttctgcctgcttatattctagccattctggcagctgattagattgtgcccccccagattaagggtgagtctgcctttcccagctcactgactcaaatgttaatctccattggcaacagcctcacagacacaccctggatcaataccctgtatccttcaatccaatraatttgatactcagtattaaccatcacaccagcatagagtagtagaggccatggatgtggatatattgtgtacattgaggtcgtggttgggtgtacatgcagagtgagaagattaaatgcccaaagattgagctctagtgaaaggcacaattgttacagggacatcactaaagatgagcactgtaacatggatattggtttgagaattaatatttaattatagccagggaccaaatggtagatatagtatctatactagtccattttcacaccactataaagaacaacctgagactgggtaatacataaaacaaagagatttaattgactcacaattctgtgtggctggagaggcctaaggaaacttaaaatcatggcggaaggctgaggggaagcaaggtacttcttcacaaagcagcaggagagagagagagcttaagggaaactrccacttttaagccatcagatctcatgagaactccctcagtatcaccagaacagcataggggaaaccacccccatgatccaatcacctcccaccaggtctctcctgtgacacatgggaattacaatttaagatgagatttgggtgggatcacagagacaaaccatttcattctgtccctggcccctcccaaatctcacattcttgtcacatttgaaaaccaatcttgccttcacaacagtcccccaaagtctaactcattacagcattaactcaaaagtccaagtccaaagtctcatctgagacaaggcaaatctctttcatctatgagcctgtaaaatcaaaagcaagttacttaacttccaagctacaatggaggtacaggcaatgggtaaatgttcttattccaaatgaaaggaattggccaaaacaaaagggccacaggcctcatgcaattctgaaacctggtgggccagtcattaaatcttaaagctccaaaatctcatttgactctgtgtcttacatccagggaatgccgatgcaagggatggactcccatggccttgggcagctccacccctgtggctctgtggggtatatcccctgcggctcctttcacagcctggtggtgagtgcctgatatagtttggctgtgtccccacccaaatctcaacttgaattgtatctcccagaattcccacatgttgtgggaggaaccccgggggaggtaattgaatcacaggggctgttctttcctatgctattctcgtgattgtgcataagtctcacagatctgatgggttcatcaggggtttccacttttgcttcttcctcattttctcttgccactgccatgtaagtagcatctttcacctcctgccatgattctgaggcctccccatccatgtgaaactataagtccaattaaacctctttttctttccattctcagatacgtctttatcagcagcatgaaaatggactaatacagtgcctgtggcttttccaggcacatggtgcaagctgttggtggatctatgattctggggtctggaggacagtgaccctcttctcacagttcccctaagcagtgccccagtggggattctgtgtgggtggctccaaccccacatgtcccttctgcactgccctagcagaggttctccttaagggctctacccctgcagcagacttctgcctgaacatccaggcatttccatacattctctgaaatctaggcagaggttcccaaacctcaactcttatcctctgtgtgcccgcaggcccaacaccacatgtaagccaccaatgcttggggyttgtaccctctgaagaaagacctgggctgtacgttggcccctattagccatgactggagctagagcagctgggatgcaggctgccatggcccaaggctacacagagcagcagggccctggacacagcccacaaaaccatttttcactcctaagcctcctggcctgtaatgggagaggctgcttcccttgttgggagaggctcctgtacggtgatgggaggctgcagtgaagatctctgaaatgacctggagacattttccccattgtcttkgctataacatttggctcttcattacttaggcaattttctgcagtcatcttgaatttttccccagaaaatgggtttttcttttctacctcatggtcaggctgcaaatttttcaaacttttatgctctgcttctcttttaaataaaagtgcctgtttccaataatttgtttttgaatgcatatgactgaatgcatttggaatcagccaggtcacctcttgaatgctttgctgcttcgaaatttcttccaccaggtaccttaaatcatgtctctctagttcaaagtttcacagatctgtagggcagtggcaaaatggcaccaggctctttgctaaagcatagcaatagtgacctttactccagttcccaataagttccttatcttcatttgagactacctcagcctggactttgttgaccaaatsaccataacattttaatcaaaaccattttagtttctaggaagctccaaactttctcacatcttcctgtcttctgagccctccaaactgttccaacctctgcccattacccagtttcaaaggtgcttccacattttcagtttatctttatagcagtgccccactccaatcaccaattttctgtattatccattttcacattgcaataaagaatgatctaagactgggtatttatacaggaaaaaggtttaattgattcacagtttctcatgactggggaagcctcaggaaacttacaatcatggtggaaggctaatgggaagtaagggatgtcctcccaaagtggcaggagtcagagagtctcagggaaaactgccacttttaaaccatcagatctcatgagaactttctcactatcatgagaatatcatgggagaaaccacccccatgatccaatcacctcccaccaggtccctccctccacacgtggggattacaattcgtgatgagatttggrtggggacactgagccaagccatatcagtatctttttaaatgtagagttatttctgttctacttactatgtatgcacaaacatgagagggaataatttaggaaggtttcctggtttctgtcataggcaaataaatcgatagaggaataccaaaaacaaaacaaaaaactaagcaaaaacatatgtgtgtgtggatgtgtgtgtgtgtgtgtgtgtctacatgattatgtgtagcataaaagcattttttggatacattaacttattttttgcaactaagaatatattatgaaaaatatcatactatagagggaatttgagtttcgttagtcagatgcaattatctcccactgtgtgaagctgactttccttatcaagagcaaagtaaaagggctaagcctattatgctgtctctttgatgtttttataggatrtaatgaaagatgaatgctcgatgctcaagctgcagctgaaagagaaggatgaactcatttcccaacttcaggaagagctggtaagtgataacaatgcttggyccaygagtgtactttactttcaaggttatttgttccacrcccttatttattaacaccaatggcattagttatttgtaaatccttccagtggttcaatccaatgatcagtttttataattctgtcatgaaaactatagatctttgacaagctgaagaatagaaaggatgttttataatatatgtggaaatgtatatggttccagaaacatatcactgaaccaggattaaacatttcggttgtrtctatcagaaatcttgaaggcttaggccacattgtttttgtaaagtgcatgatttaactccataaagctatacctaaagatacagatctataatataaagcaaaatacttgatctagcaaacaaaaccagattttacattttacttttataaagccatcaaaaatacattaacctaatgagacttcttgttaatttattatatagttcccaaattatgtaaaaattatacaaaaatatgcagtgtgtgtggttcaggttttagagtatggtttttaatgtaatatcatgaaagaaagtaaggaattacactttcataatataaaaatacatttggtagatagcagacagagcagtgggcattattttttctaagtatgtgttttctatgtatctatgaatattaacagtattttgcaataaaatgtgcactcaatataaattttaaaagatagtactctaaaacaataattaaatagaaagaaataagaagagatatttttaattcatcattcatttttacactaataatagattaaagaaataaccatgcaataagagagaccctgactcattatcaagatcaagaaacaaatccttctcaacgtatttttaatgattatttcagactcacaatagtgtattatgtaattattgaacacaactaaattacaaaacagactttatagaccatcgaacttctgaggactcctaacatattagtgagatattggagaaattcagagcatagtttatagactcttcacaactgacaatgttttccctgaaacttgatctttatttaaacagtgttctaggattggattgatgctgatccttggtcccattaacatgttactgtggctttagaagacttataaactagtacttagcataagaatagtatcacagacaaaaggaacacgtgttacattaccaaaataaccttttataaacctgtaagtaacatattgtagtgtcaattttatatattacataatgaaaacatttctttatttaaatatagccctctaggtacatattatctaataatgcttttttacgttgcatacaaaaatatctttgagttgactaaatatcacctatagatatttattgcataatggttaaaataatcaattttaacatagcagagtatttattactttgtcagagagtgcttattttgaacttgggtaattaactcagaaaagagtattctttttttctcagcattagttatgatcagttttaaaacattcatatacaagaaattggaccttcatttgctgaattaaatgaaaaagaaaatgattactttcaaagacagtactacatagttataatttaaaaaatttagtatacctccatctaaaaaagtcctatatatttctttttcttttctttatacttgaattactcaaattggctacttagtttctaaaatttctcagggaacaatcaagcagcattttaattttgtgctattgtagtttccataatcatcttgaataaacaggaaaaatgttaactttaaaaaaaatatagtttattttattaattaaaaaggactgcagctaagggagaagtatgtaattggtgattcaagaattttacttagaggaaacatggttggaaaaaaaattgtcattcaaactggatttggagcatggataagaaatgccaatcatgtaggccaatacaaaccccttgcatccacggaaaattttggtcctcctatttctggtcctggtaataaataacttgtgacattttgttatggtggaggttaaattttacacttatgctttacttacattgaaaatttcaaaaaattttagaaaccagttgagttataccctactatatactacaggttcataatctttaataatttagaactgattcagttttctattctttctcatgggtttctgatttcttgaccactgttattatcacaagcaattgtatctacatgtayrctgtagaatgaaattagatgtaattgtaccaagaaaggctttattcccaattagtaattaagaaagttttaaattttttgattatttatatttttgagttagcctcatcaatagtgggaagagttgtaaaaagttagggacagaatgggtctagaaaaaaagaaatgtttttcttttcttttttttctttttttttttttttaagatagaatcttgctctgtcaccaggctggagtgcagtggcatgatctcagctcactgtgcaacctccacctcctgggttcaagcrattctcttgcctcagcctcccaagaagctgggaccacaggcacacgccacagtgcccggctaatttttgtatttttagtagagacgaggtttcgccatgttggctagctggtcttgaactccttacctcaaattatctgcccacctcggtttcccaaagtgctgggattacagatgtgagccaccactctgggccataacaagttttttagtcatttaaatgcaaktgttttagtcatttgtttttagggcatggtttctgaacaatagtgctggtggcactttgttgtgtctgtgctatgaattgtaggacgtttagcagcatccctagcctctctcctctagatgccagtagcacctctacacattgccaaatgtcccatgggggcaaaattgcctccaggtgagaaccactgctacagggatattagattaaatgtgtagtccccaatgaaatggtatgttatagaaaaaacatctatttatagatacccaggaaaaaaacaaaaaactccagcacaagagatgcacctttccttgggctattaaatatgtaactgtttgtacactgtatttatctactaaggctaccaaaacaaaatgccatagatggggtggcttaaacaactaaagtctatttgtcagatttctggaggatagaagtctgagatccggtgccagagtgttgggattgtggtgagggctgtcttcctggcttgcagatggccatcttttcggtatgtgctcccatggtctttccttggtgcatgcacatagggagagagagagaagagggagaaagagagatcatgtragccctctgatgtctcttcttctaaagacactaatcctgtcataaggaccctacctcatggcctcatcaaaactcccatcatctcccaaaggtcctatctccaaatatcatcacgccgggagtcagggcttcaatacatgaattgtggagcagggggaacaattcagtacatagcacatactctttgtgctcatgactgtttaayattagcaagttcagttgtggaaaattagagagttctactatatatttttttccagcattaaatgcacgtttcaaaaattattcttttctaccatatgatttcaaaattattacattgccttaattcttttttattgctgggtgggtagatttcacaaagcataaagacactgagaaactgaaaataataatttcgatttaggattatatattgatattatttgggtaaactattcagattattaattgcatttctaatgtgaatgtatttttgtattttatagccacacttccaatttattccttctttttaaaaagaaaacaataagctgtttgtactcttaggaacaattttaaaaagtcaagacttattatccctgaaatatttatgcattacttaccttggtgagatttactgttttcaacagatcgagataaaaataatcacttgtaattgttttattatgtccaaagggatattaaatgttagaatattacagtgtcctgggattatgtgctagggaaactaattggagaaaacgagacatacattctgtagccagaagtttgcagtatggtaaacagagaggaaactagttcacagcatggaacatctactcccaactgttctataatagaacaaaatctcctctgcattaaataagaaatagagcaaaggaaaaatttcttctcttcatcttcctggggccttagctttctttacttgaggagaagagtgagtcaatatggtgatatggaaaattgggatatgagtttcttgtcctacctctaatcttaattgcctatgtgaccagatttaggtatttttctctatttgggcattggtttcttcaactgtcamataataccactgtatgttttggtctgttttgtgctgttctaacaaaatatcacagactggataatttatggtaatttataaaaacagaaatatatttctcatagttctagaggctgctaagytcaagatcmaggagctagcaggttagggcccatctctctgcttccaagatggtgccttgaaagctgagggaaggaatgcttgtcctcacatgatagaaaggcagaagagtatgaatctgctcctgcaagcccgttttatagcagctttagtatatacatgacatggaagccttcacgagctaaacatctctccataggtggcacttcccaacactgtttgggattaagttttcaatgacagaatttggggcgacatactcagaccataggaccataacattaaaaatattacatatttatcaatagtgaatttgatagattatagcatatttatatttatataactgtattatatattatatatatttttatagctatgttgcttataaaattattaagtggagggaaaagcagattttagaacagcatattgtataacacgatgtgaaaaacgtatattgtatagaaagtctagaataattaatagtatttaactttgagaaattagactgctcaatttctgctttaatttggtaatgtgtcatttttaataacaaatatattacttgtataatcagaaaaacaccagactacttctttggaaaataaatgaagaatttcaatgtgtttaatggttttcattccrtgatcagtgtgtgttgggggaaataagggccgcagagggatcctgtggatttctattccccacccacttaatgatagtagccctcatttcattgttttttgcatgtcattacttattacagtatcatttcaatcaataagcagtttttatttaatgcatatcattatactcctaagattttatttgatgaaaaaccacagctgagaacaaaatcaagcaaacaaaccaaaaccctgaacaagatgattgctaagaactactgcgaactattaaacagggtgggaaatgagaacaaaagctatgacatacacctcagtgagaattattacacatcatggtgattggagagaatattagctaattgagggcatggaaaagaaccaacgttcagaatcaaaaataaaaggaggacttttttgataattaaatgtttggataaatagtttaaaatataggttctatttatgttgtagaatatattggactttttgaatattagaaatacatcactcttatccaacagaaagatttagggattttactaatttaatttattaagatatttaaagcagagctrtagatttagaccaaaagtctaaacataatagctaaacgtatgcatacttaatcataattaattataataaaaggtattttaaatatttgcatcataagtttaatttattacacttaatgatataaaacagagagatatttttctcacttctgagaaagtttcagtgtctttccctcagctattttgtgaaggttatgttgaagaatgccatgtrattttattgcttatatgatactgaagggcactgtaaatattatcctcaggttactaaaataaatttgagatatttgtcataaatgttgatggtgaagtgtagtcttgtgttttggggggatggatatgttcttgtaaatgattattaatcttatcagtggtttcaaaaatcttatacatggttttacactatggatgaagagtgtgtaccatacgacatcagaaattgaagaaagtatatttggtatttattaataaattaattcaaaatattttttaagtaagttagagttaaattacaaatgaaaacataataaatttagttagttctatgaccgtgaagagaagaatttaattgtcctaattaaggttagtagacggtgctgtgaatttactgttttaacttggatgacaatttacatatacactttcaaaaatgttaaacagatttgtatggataatcacattactaaatgtaagttgtcagcagtttatatttctgaacttttggggtttctaccattcagaattttcctgttggacacttttatttgttttctagccgatcrgggtaaaatgtatcagatacagctttctatgtctatttctgtaaaaacatatgtgttttggctgggcctggtgactcacgcctgtaatcccagcacgttgggaggccaaggcgggcgaatcacgaggtcaggagtttgagtccagcatggccaacatggtgaaacctcatctctactaaaaatacaaaacattagctgggcgtggtggcgggcacctgtaatcccagccactcccgaggctgagacaggagaatcgtttgaacctgggaggcggaggctgcagtgagctgataacgtgccattgcactccagcctgggggacagagtgagactccatctcaaaaaaaaaaaaaaaaaaaaaagtttctatttaaaagtccaattcaaatgggtcaccggaaaaacaaaatagattttctgaaaaagtaagtttattagccctctgtaaaataaacactttaataacagcccttaataacattatttaaacaaaaaagcaaaacaaaaatacttattatgttttctttcataatcttcctctgtttactaacattacaacaactatacttttcaatgctagtgaaatttaagttacctctgtttactaacattacaacatctatacttttcaatgctagtgaaatttaagttaccttcaccaccacatctttttaagcagtaagggaatacattgactgtaggaataatgtatgactattatcagaggcaaaaatttaaaacatgtcggtaatgagagactctttcctaagaagatttttttgtgggtctgaattctaaatgtaggttatgattaagttttaaacttcacacacacacatacatacacacacacacacatttttccccacacactttaaaatttttttcaattatcacatttttttaattacctgtcctttaataaacaatgcatttttaaatggaagtttaactaggagatttcagttatggagctgaaacactcaacgattccaccacacatttttattttgagagttaagtttgtgatcttaagtcagaaccttccaactagctgtaaactgtttgtgtttctaaaatttgaggtgctacttattaatgtattcaaatatagatttcaaaataagcaatgagagcatagttattgtaaagacaaagacatggaacttgagatacttaaattatatcagttaatagtaaccatttggagtatttatttgtatttaagattcaaaacaaaagaatagtgtgtgaaccgtgagctctctattttggggggggatgtttggacattttagtttataattaaatattttactgaattttaataatatcttcaaaactgaactttattttttattttaaaatgttaattttacttttaaaattaaagcacaattaaaaaataaatgttacatcaagagcgtgatttagtaattacctatactgtatcttctgcagactctttttttattaaacaaatattacatttattaaaatttactttttactttttgacatatagtttacacaaagttaaakaaaagttttaactagcttcatttcttttctggccattattaatattaatttattgccatattatttaatcctatgtttttcttttagaagaggacggttaaaaataagcttttcaggcatccattataatagatacatcattgagttgaacactttttcctcccgtaatgtaaatatgaactcaagaaagccaggcctcattaaaaaaaatgtttaaaaacatgtatcccttttcgtgttattcaacctactktgttctcactcaaagcaaatattgaaaattatattcttacttgagtgtaagtaagcatgtaaacaatcatgtttctccaaccttttcaaatgtaatttactttattaactgtaaggcaagttctcggctcatttgttaacaattgaatagcaaaacatgggactgaataaaggcacttgtagaaatgatgatttttgaaaaaaattgaaggcagttgaaaaactgaaagtgtatcattatgtgtaatcaggttactatgcataataaaaagggtgagctaaaaataaaagactaagaaatacatatggctaactagcactttatcagaaatctagagaggagtaattttgatactttcagaattcaaattgaataaaatggtatgcccttgatactttaataacagaataattcctgcatgataagagaaacattctttgtgcatgaaaatcatatcatgaatttatcttaaaagtaattccccacttgctctacattctattataatttatggtattatttcatgctagtcattttagaatagaatattacagctccatggatgatttacatagaaatggacagctgtaagtactttcaaatcctctttctttttcatatttaggaaacattacgaacagaaaagtaatagattaggtatacttaaacattattaaagtgtcaggctactttccttcttttttcaggagaattaattgcatatattccagaaaaggcttatctcagcagtaattactctcctagtcagctctgtaagacagatgtagagtgtgaatgtgacagtatcctatgatacataatggggactgcctccagtttcttacacactccagtaccctgatgaagagctgccaaaaagatacaatctttaatattcaatggaatttgctgtagcaatagtacatatttgttaaagtctttatcacaaagggttgttatattgcagtacagcatggatataagaaaataattgctctatgatttaaatgccaataggaaggtgttttacctttaaggcataaattgagttaaaaatattccaccatattgtgatcaaattaggcatgtagttgaaattaatttatacgtaaagttaaacagttgaatattttggatattttaaatttattatataagctatgtcatacaatttacaaactatcttctttattttatacttcttttgttacactaatcaagattccagtacttagagtaatttaacaaacgcaacaatttaagtagtcagtgggacataatgatagccaaagacttagaaaaaaatatataacgcatgttcctgaattatcatggaaattaataatatgcagaaggggaaatatgtgtttttttgtgtgtaactgggccgtcaaaaacaaaattacagcaaatttagtttaaagatgtaattggcttttattaacaatttatgaatttgtggcatctcatataaagatttacaaaagttcctcctctgggcatggcaaaacaattggtatttttttgtttgttttgtttttgttgttgctttttttttttttttttgagatggagtctcgctctgtcaccagactggagtgtaggggtgcaatctcggatcactgcaacctccacttcccaggttcaagcgattctcctgcctcagcctcctgagttttctgtatttttagtagagacggggtttcgccatattagctaagatggtctcaatctcctgacctcgtgatccacctgcctcgtcctcccaaagtgctgggattacaggcctgagtcaccgcactcagcacaacaattgttttttataaggtactttgaataggaacaaggaaacaagctaatacaaaaagtggattgtttaacatcaggttacttcatgttactttccttgtaagagttaaagtggaggaaacttccttattatgcccaataaaaactagcttgtttgggatttggctatcacctctacatgatttcttggaaggccagaaaaataagttaccttgagtttggtgacgtggaatcttaacatgaatgactccattttggttcagtcttttggactctagtacagaagctcagtccaaaacaatggcctcctcctttatttaactgtatgtatataaataaacatgtaatgttctacttcacaataaagtatgtttaaaaatttgaaagtcagtctgagccggggactttgactggagcaagtgttaacatgatgaaggagtagagtggtatctgtcctcaaggaagcaaagggagataggcttacataattttaataacaacagccactagctactgagctcctaacctttgacaggtactgtgaatgctttaggtttattattgcctttactttttataatacaattgagaaataagtattattactcccagttcattcataataaactaaattcagggggattatgtgattcgtttaattctgcataatacatgacagttaagattgagaggaaaatctgtctgactccacgcacatgttattttccctgttacatcaaacagatttataaattacagagagattacaaacatattagtggtataaaataggataacacagttcacttttgctacatatcaataccgaaataaaaataatagctactatttatggattggttaccattcatctggtagtagcagtcagacttgggtggtcagggcagaaactcttgtgatagtgttactggcaaagccggtcccccagaagtggggggtctttccccgttcagtgttacaaagccattatgtgaaactggaaatgagcatcaagcagttcagactttatttgatggccatggaattgagaagtgggagcacagctcacaaatcaacttctcagctcctgagagctggaaagtcacagatagaaggctacttgaattaaggtgttgagcattaaaagcaaggggaggaatatccgtgcagtttctgggaataggcagagaaaatctcagaaccagagtgctgccttccttttatggtttcttctggtcattgtcatgatgattaactgtcatggcactgatgggactttcatttagcatggaaattagattacaataaagttagagtttcttcagaggtcaagtgagctgccatcttggataccactggtttcaactggtctgatcaggttgggaacttcagaccacagacatcctgttcttacaaattaggagagtcaaggtggggtagcaatttagctatgctatacaggcattacactgggtaatgataacaaaacagaaaaatttattttagaggaatcacctacagccacttcttccagccttggaagtgagaatggtgggtttcatcaaaaagcacatagggcatcacagacacatttaatgtcattttagtaatcatgtcctatttcatggacactctttatatttgagttaaacacattattacttgtaaaatcatgacagcattatcagagacatgaaaagagaacaatttgagcatcttatctaaaagctgtgtaggggagggaagaattttcttttgccctctgagagtttaataattgaatctgttaaataatctgacaacgggcagattaataggagaatagttacacaaatttatcatgtgcaccagaacattgcaggaaagacaactgaataccctaaaaccaagtgagatttatcattcttatataccctggttatagagccgagggggaaggggatgtaggcaatttataggagagtaaatggttttggaaaaaatgaatgggccctcagaagaatacatggtggtttgtgacaaagttggtctgtgtgtggtgccgacttcttgtcttcctctcctgtgataagagttaatcttccctggttgatgcagccctcagggagaggattggcaatagctgtattactttcggaggagctgtctttagccagataaggggagctctgagaaaatgtccacctatatccaacatacctcaagtgctctcaatttgaagtaattagcataccaaagtggcatattttgaagttgcattttttgaactctttcagctgagaaagcaaattttttagtgacttaaaatgtatctttatatttttataacatgtgtgaatgcaatatctacatacttatccataagtctatttatatcactaagaaatctcccatagtcagccaaatacagagtgagagaatggtcaaaagtgaggagaagcactaaatccaaacagcatgatttcatcatgtcttctgattaaatattttactcagtggatgaacaaaacaagaatgaatgggctggagattgtttttaaaaatttagtttcgtatcactttacaactctttgagctattctaggactattatagtttctgtaaggaataaaaaggaggattttaccagttgtaatccccactagaagcttgagcttaagtgtttttcctgtgtgttccctttttactgtcaaatgtggctttatcattacttgtttttccctctcattggtgggctccttaatgatagggtctttgttctcctatagcctcaatatctaacaaagcaggcaattagtaaatatttgaaggaatgaataaaatttatatcgtattttttgctcttacatttgttaggagaacttttagagaataaagcaagacaatgtcacattattaaattatatagatgaaagatagaaatgaaaggggaaagaaagactgtgagtttaggtatataatttcctggaggaaccactagatgccaaacaagcatgtggggatgtcacctaggaaacttaaatgcaaaatgggtatcaccagaaataacagcaagaaaataagtggaggaaaacagagctatgaaatgatccaaagacaagtagtcaagagaaattatagaagtaaaaagatagggtaaagttaaaattgattctaatctaaaatattgtagaaaacaaagaaaaactaaggaaacaacgttcaacaaaaccatgaaaacttttcaaaaatttaggaagtgctaagatcatctgcttctcttcatttcaccagaaaaacatcttagtgaaataatacaatttgaagcctctcttaaaaaactgattttttagatagaatggtttataatgtgaacaattcataatagaaaatagctatgggtaggaagttaatgagactggagaaaaaaacagctacgctaaaacataagtacaaatgaaagagtaaaaataaatttaaaatgccaaacatgttcataacctatattgatgaaagtattgttagtggtggtagagatccaagttaccatgagttaacagcagcctgtctgtatgggtccatagtaacttcagtccttgccgcctcagaaagaatttgactgaggggcatagagcagaaaaagagagcgaggcaagtttcagagcaggagtggaagtttctttaaaaagtctttagaacatgaaagaaaggaaaatttgcttggaagggacccaagtgcacacctgaaggtctgcgagagagtagatgacagcaaaaaaagagatctttaaccttgatcctagaactttataggctggtctgtttcccgtaattctttccttagggtgggcttcctgcatatgcagtgctttccttaccttttggaattgagcacattcagtgtgtttagggagttatatgcatgcctatctgaggcttccttcctttttctagtagcatgtgttcttgaaacatcacacttcgccattttgactgttaacactcatgcccaagaagctgcttctccctgaggcctacattcaattaacacttctaatgttagcctgtgtggaccatcaggagattctctccctgacagccaaattatcgtttctagagaggcaatacgataattgccaaaccatcaccggacatttctagtgagtcggggagagacctctcctgctccgctcatgcttaactacagcataaaatgttgagaagtatatgaagcaaataattgttcatactatgtgtcaatattatgctatgccatttacttgtgtatcttacctcacccttggccgtaatttttcttttatattgaggaaaccaaggctcaaagatgttaaataaatttctcaaagctgcagaatgtcatttaaagaatctaagcatatgcaaattaaattttactatgtttgctatggagaagcaaaaagtgcttcagtgtaaggttccttcactcaaattatttcccactgttaatagcatacacagacttgtggagtatgacactgagaggaacaaagcaaatagagaccagtcaatttgatggttatggggatttctgagctatttaagttcatggaactttgttgctttggaatgagagatccttaaaattcttctaattgccacagacacaactgcccatttttctgttttactaaattcacaatccctactctattttgcagtttttggtttattacacagccagacaagatgaacttgaatcagtaaagtccccaaagatttgaggcagccaaacacacccttccttttttctctattgtataacttttgttaattgtccttggactatgaacaaacaactttggtagtaacactaaattactatttaaaaagtgacatatgtgtattttaataatgaatgctgaggagtgaatcatatctaacactaatataacagatatcccatccatataaactcccttcccattgtcctttttcatgttaatctgtaatcatttcactcagcctgtattccacttactgttcccaaccattctgggcattatgttggttttactgtcagtctcaatgtattacaaacaggggaactgaggttcagcacaattaatgaactatctcattagctaacaagcagtaggaaggtatgcgcatactaagatatgcgtcagtgtggttctacactacctttgctgaagactgacttctttatgtgtgatatgcgaagagatgccattatggagaaaggaaggtagggttgaatactgaaaaaggtatttgattattgatttttctttcttagtggatttgacttttacagtgaagaataataggtactgtattcattattttctatcattttgcacactgagatattggattgcatagcctatcttgttataatctgtcatttaagaaaactgtatcattatataatttctattgatgagcatttatatattttttcctcctctgaactttgccacaaaaggcatatttgttttagcaaacattgataacctgctaggaagatgagaatatgcctattacactgttgaagattggctacataayttgagttatctacaatatgttgcaaaaggcagatacttggcaagtttaatgccatccatctgatgtaattgaacttaaggttggatgaatagcacttcatttcatccttgaaactttacgaacatgactgttattatctcaacaactaatgttgcttaaagaatgttcattacttgcatatcattttttttccacaaaagaataaccttgactaaatattaggtaaaatttagtttagactatatttttgaaaactttttaaatgaaagttatctaataagagaagaggaaaaaattatgttacctaatattccactacctcaatatagcctttttgatatattcatatgtctctccctcctccaatttttatatagcagaaatgataatggctatatgttttgtatcttgctttctaataattgtatatcacatatatcttatatgtgtaattacgttcttaaaataaatgttcaaaactctgattagtggagtaaagggcaagacagtctttttacaagcatcaggtattactatgtgactctttttttttcctagttcagtgttataagtaacaatttactagtaatgttatcttttatcatttgtctattaaaacaagcatatattaaatggattgccttcttgaaataaaataaaaatttaatagatttatttttcaagttttctttccatagtagaaatgtctgcaaatgaagagaaaattcttcatttcagttgtatatattcaactacagctataggtgtagatacagatagaacatgtgatgatagaagcaaatatctgaaaatatttttctgagctgcagtgaatgagcaagctacataaataatgaagcttttgttttctagtgtgtgaaaaagtgtctacttcttaaaaaactaaagaacttaagcatcttcatcgctttgagttgactttttttaatgtttgatgatccctcttttgtgatgtatactgaactaaggttaccaatgtgcaccatctttgagatccataaaaaaataaaatagtgttttttggaaacattttttatcagtcattaagcaaatgatcattatttcttttgtcagtttaaaatctgcagaaattttccatattcttattttaattagaaatgtttgacaattaaaaatccacaccaaaggatgctgacaaggccagtctttgtcaacactttatagatttgtccttctagaaccaaatggtgtgtacttcttaaagagaatattatggaacaataaaattgcaacattatttatagtgttcttccatagaaaaattactaagcttacttttgtaaagaatatattttctatgtataaatgggaagaaccaaatctactgataatcaatatatgttatcctatttatagtcatctgtgagagagcaggaagatattaagcaattggtgttactttaaagacaatggtctttcgttattcacagcttttcaaataacctaatgggcttatcctaattttctgtgcggccataacgaaagacttgagactgggtaatttataaataatagaaatttaattctcacagttttggaagctgggaagtccaagatcaaggaactggcaggttcagtgtttggtgagggcttttaccctgcttccaagatgacaccttgttgctgcgctgtgtcctcaaatggaagaaaggacgaagaggggcctaactcattttctccagcccttttataagtgactagtcttgtccatgatggcagatccttcatggcctgatcacatcctaaatgcctcacctcttaatagagttgcattgaagattaagtttcaacataaattttggaggagacacagacattcaaaccatagcagggctacttccctttctctaataggacagtgccaaatagcctctgaagttatggagcctacagatggccatcttattatgcctattccttgtgtgtttctttttttggcaataataaaagacttaatgatgagctatttgtgcatacctataaatacatttcgtttgttcactaccagccagtctcctaagaaccagtgtataaaatggttcatgacccactagcactcaaatatttaatgaataaattaatgcattattcttagtagacaaaatacatttgtaatctctcaattaaacaaacaaacccttttcctgtggcttgaatgtgtccctcaaaagttggttgtgttgaaaacttaatccccaatgcaactttgttgggagctgaggcctaccctcctcccaacagctggtcttcaccctcaagaatggattaatgtcattactgggaatgggttattcaattggagagtgggttattataaagctaattcagcccctggtgcctctctttgtctactctgtttgcttctgctttctggccttccaccatggggtgatgcataccagatgccagtgccatactctgggacttttcagtctccaagaccgtgagctacataaacttccttatgaattacccagtctgcagtattctcttatagcaacagaaaatggactaagagaagtttgatgtgtgcaactttaaatgaatttttgtgtatttttacagtttaaaggcagtcctctgtaagattccagcaatcagccctcatggaagcctcaagcctattttccttcctagtactcacaaggtgatttttaataatcaggataaaatccaaagtgaataatttatttcttgctaaaaaaactttttaaaagttattaggattccacacatcattctcaaagggtaaatcaaatattagcccctcagtaagttgaataaagaattgataatgaacaccacattgatgctagatgctacttgatttaatagtttcaatacaatctccctcttcctgttgaaattccttagctatttacagtgcagagagaaaaaaataataattctattctaagagtagtagtgaacagttttcaggtgtttatcactgatacaaattaagaactgtgtctatattttgtataattgcatcatacagctgtattaaatcttatagtatcaaatattagatctgatttaatagtattaataaatttaaacccattttaatcaattttcaaaaaaataccgtgttcagttacagaaaatggtgcttagttgcagactgtatcgtaccttttaacacctgatgtgtacatcccatgtaacggaaagggcgacaataaaatggggattcaaaggaaataatatggcagaataagatgtgtaagcacgatcttattttcttttctcgtacagaatacttacagttattgagccttccagaaattggaagttacstgaagccactcaagtttccttaaaaaacaaaacaaaactgtctatagttaacttgatatgccacttttcaaatgtttctaatatttattttattttattttaaagtatgtttttcatctgcatctaccaacatttattcttgggcttttaattttacctttttctcgctggcctggtggctcacgccttaatcccagcactttgggaggccgaggcggatggatcacgaggtcagcagattaagaccaccctggctaacacggtgaaacgccgtctctactaaaaatacaaaaaattagccgggcgtggtggtggacgcctgtagtcccagctactcaggaggctgaggcaggagaatggcgtgaacccgggagggggagcttgcagtgagccgagatgacgccactgcactctagcccgggcgacagagccaaactccgtctcaaaattaaaataaaatgaaataaaataaaataaaataattttacctttttccaaactaatgtaattgcttacagctcatatttgagcttctaaatgcaatgctattggacgtatttgccacttcatatttaaggcctcttttactgtgtacggtatttattaccgtggagccatgagaccaaactgcaaggctctaatctcagttcagctrtatgtttagaatcactgtgtgctgttcatacatgggatttgccccctgagcatattttatttaaatctggttgcaagacattttttttttctttcttcatacatcatcgataacatctaatgctttgttcaatagcacctggaattttcatccaagatgacagcttagggaaattgaattttcccagagaggtatctccaactagaatatagttttaattttgccaagctgaaataaatcataccagattgttttattctatgcaagacatctgggagacttttgctgcagtctacagaatctcatgccattgtgaaatgtttgccttatggacaacacaaggtctggggcataatactgcgtgtttgctcatttccagtgactctatttaattaagtctagaatacaagcatagagactctgctttgtgaatctgatgctcttgtatatgacttaagtttatgtcaggatttagggaaaacattctcattttggtagcattcccaacattttgagatagtttgacttctgttcagacctagcatgagatttttgatatatgtgcaaattgtgtgacactgttggataaaaaattcttaggtacaaataaagttgacaggtaggacttctgtccatccacatccatgccccacattccctgatctttttaataataacgacaaaaacatgatcagtgtgcactcagaacagacatttagatcaaactaacctttgggtctggcatcctaatgaatgtattagtcaaatgtcacaaactgcacaaaagcttttgtattagaaaaacaaaaaaaaaacaagcttagaatggatgagcagatgcatattcttctgagcttctttgactcacaagctttgctttgagagtcacctttccccccactgccctctctgactcactcttggagtttctggtacataattaagacatatggacaaattcccaaattctagggctaagaataccagcaaaggtgaatttactatgaaaataaatgaagtttaagttcatgaagcttcacctatacccatcccttccaagacttgattttcttctaggaagttgtggtatgaagcagcagccacagccacacactagagtgtgtgggccacagaagtcctgatttgaaccctggactgggtggagtcttggaagcccacactaccttcatgtccctcagaacctcagaggtaacattcctctggtggacttcatcaagtgttcatcccctaactttgactccaaggagaatgatctaaatcagatgttgctctgttccctggtctagaccatcgcaacaaaactgcttggccacttggccgctgtttttctcaagaaacaagtaacttcactgagcaaaaatgtaccagtgtggcatttgcaatgatcagttgaagctgaaaataactttatctaccactaataataaaaataaaatttaatcaaccaaatcataggccacactgaatcatctttctactatctttataaaaaatattgtaaaaattgctgtcatattaagaagcaatcaaagcatatgaagccaaaaataaggaaaaacagtattatagatgactcacattcagttaaccataaaaatgaaataatatgtttttctaattataatttttatttctggaatttgtcacttttaaataatctgtgattatttttcttctaagtatatatctttttaacaaagttaacaaaaaacaaaatatatgggcactaagaggcactctagagaaagactgaaattttttttgagtatttgaattacccataattacaaattttagcttctcactattcacaatacattttatgtccctttgttttgcttagttagataggatggaaatcttggctttctgtcatttcctgtgcagccctctgcaaattcttttcccaacctatttctttatctgtaaaatggagattataatacctatttcatcatattactatgttaaacaaaatgtttttgaagtacttagtacgatgactgaatacaaacaaataataaatagtaggaaagtctatgttgattatactatgtaaaataagtataaaaaaatcatgagacagcagtgtaatattctaagacattggaagagtttaaaagaacagttttggaaaactgacttcatacttgtatgtactaaaattgagatgcccatgggacatcttagttgagatagctgttagatatttggattgcaggtctggaacttagcagagaattacagttataaatttttaattattaatgtatcagaagtagttgtaaccatgagtaaggatgatattatatgggacagtgtttaaggcaaccataagatagatttgaggataaatcccagtaatgatatttggtgcttagtttttttagaattatcaaggaatatagaaattgcatattaaaatgccctgcataatttctagcacatagtagctattctgtacactttattgtttattttgattaatttaagcaattcagtataaaaaagaaaaaaaacccaatctttttagtctatcaaaatttaaaggaagacttctaaacattaacatagtaattttgtatatcccatataaatctatataagaaaataaatcctataaactaagatacttttaaaatataagaatatgagtactttttttttagtgaatgtgatctttatggaatttttttattattagaatggaagtgaccctggaagctttcttattgtatttatttaaaacatttcagttgtacaatttaattcagttgtctaataattaaaataaattgtgtaaatatgtaaattgaatgaactgttttctactgttatgtacatatttgaattcaatttatatgatctgcttgatcatttttaataatttaatatgtatttaaatataaatatttcataatattttttttaagtttttaaactttttatttgcatattaaaaaaattgtgcattccaataattaaaatcatttgaacaaaaaaaaaatggcactctgattaaactgcattacagcctgcaggacaccttgggccagcttggttttactctagatttcactgttgtcccaccccacttcttccaccccacttcttccttcaccaacatgcaagttctttccttccctgccagccagacagacagatgggaaaggcaggcgcggccttcgttgtcagtagttctttgatgtgaaaggggcagcacagtcatttaaacttgatccaacctctttgcatcttacaaagytaaacagctaaaagaagtaaaataagaaggcaatgcttgtggaatgtacagtgcatrttggcggcgcaygcctcattacgattcgcctgcttgcttctcctgttcaatcgtttctttggaaggcagtggatttttctcttgcgtctctgtcttcttcagtttcggcttatcgaatttctcgatctcagccatatcgggtttgtcagacwtggttgcggaggaaaagcrgagcgaggcgygcgagtacgagcgaagtctggtctgcgcmgtggccaccaccgagttgtcgccataatatttttaataatgtttgcatttcttctatattgctaacttctttgagaaatattattatgatctttgtctaagaagcctattatctagattgagaatctaaacaaatacaaaggtaagcaattagtatcatctaataaatgtctcagttaattctrtcacacacttagataagtttatcaaacgtgtaagaacataatttaattaagcagagcatgtttcagtaaacaaatgtgagtgagctttttataaagtttcagattcaactacaggttatgaaacaagtgaaaactaaatatgggatagggcatggaactgtgccttcaccatgtgttacatctatagagcatatgccaactgaacttgctacagcttcattgttgcatcgtacccatcaagacccaacagtggaactacaaagacaggtgacttgtttctagaaagcaggtcctaagccctgctttaagtgtgtttatctggagggaggagcaagaagagaaagcccacatctacagatcaaattaccctaaaagagagactattggaaaggctgagctttcatatttcatccttttgcccaatcttaccaagtagttaaggcacttctgttgttgaagtaaaggtgcagaagatagaacaaagtctaaaaattcttctcccattcttctaaaagggtagaagttcatactttaaaatttaagatggggacactagaagagaaagaaaatggttcccccaaagggaagtataaaggattgatacatgaattgtatatttattctctcatcttttagtcattagtcaatattctggtctctaagttagtagatgggattgaagttattgtaataaattaatataataatgtgactgtgtaattatataaatataatcaagtaaatataatacaatatatgttatataatccatataacatagcatttattttatagcattcttttgatatctgctgctttagtaacttgcaatttattgttttattacatctgctattaaaatgaacatcaactatttattttcataaataagagaatcctttattttagtagagagaaaaattttaaatagttctaccaatatctaatattaaatgtgtgtgggtggagaagaatgaggagaaaggttgtatcttaattcagaattagaaaggcgacaaaataaccattttctattacaaaagacgttaactctatgacattaatttcaccatgggaaatctgtaatcttcattttagagaaattaattggtagcagtactatttatgaagtgctgtgtgctcaaatccttgaagaactttcctacattatgattagcctaagatgtctagcctggagtgtttcacatttttctagctttgtgattrcatcctcccactaggtatctaatgaactgaagtagaccgccctgcatttcagcaaattcaggagtaaggttttatgagtattaaaaaataattgaaaatgtcaatattcaaaatgtttcatagttcatatattttatgtcctcactacagtgcctatgcatatagcttaaagcatatcaacagagggaaaacactatattgcagcaagaagcaccctcatccatgaaagctgtaaagctccttactctttttttttttaatagttataaccttgtatgcaagtcactgtgaattttgctggcaattgtggcatttctcatcagagagtaaattcttcttcaggctggtaaaatgacatctgaataagaaggcagaaaaaaattttcaacctcttaaaacaacttctaaaaattgcaagtagacagtatcatgtattgcataatagttacataaagcagattacctaagattccctacagctctaaaacaccatgccctgacatgtcctgattgagatttttgagatttttacctgtattctagagatactgagtcagcagctagagtaagttgtcactaaatgatgcttttcctgcactttggcagataagatcagtatctgaaaacctcagccaatgtagaagcttgagaatggcatgtcttctgaaaaacaaagtttattaaaatattagtttgtgacttagataactcattcttaagaaagcaggaatgtggcagcaagggtagaaacaaacatagaagacaatgcttaataaagaagaaaatatttggccaggcacagtggctcacgcctgtcatcccagcactttgggaggccgaggygggtagatcacgaggtgaggagatcgagaccctcctggctaacacaatgaaaccccgtctctactaaaaatacaaaaaattagccgggcgtggtggcagatgcctgtagtcccagctactcgggaggctgaggcaggagaatggcttgaaccctggaggcagagcttgcagtgagccgagatcgctccactgtattccagcctgggcgacagaccgagactctgtctcaaaaaaaaaaaaaaaaaaaaagaagaagaagaaaatattttgcatgttttccctgacatagtctgggtcaggaaacattttctattagaactgtttattagggcagttttcttctttacctgtgcttctctctattctgtagactttcaaaagctaggttgaatcttttcacattataaatcaaggtgaagctgtattattcctcttctgagtgttgtcttggtactctggaagtgtgtctgactctcattcattgtttctaacaataagccaaactycaaagtaaaaaactgtggtttctcttctcagttaattcttataagttgcccaatgaatgagaatttgggcatgactcacaaataggaacttattgtgtttaatctacattctgctgtctgtcttttcatatttcccttttcctgcatattgaygtatttactgatttctctgtttttttttcccattaaaaaacamagcttggcattagtttatgctcagtaaatgttaattactccacctcattagccttgactggactaatttgttagtcaacatagcttattctcactagtttcttattcaaaacatctttaaacaaagcaaaattattttgaaagcaaaaacatatattttcttctgtcttttaaaatgacaattgtttattacattaataatctcattaaaattcttgttattttttctttgtcaagaacaagttagacagaaagtggtttttgtatgctcaaattttaatttcttgattgggtgagttctatggctatctgttgctgttgaaatttgatagaacttctcagggagagagtaaataggaaagtagcgggaatgtagatgcaaaaatgggtacagaaatgattagtccagggatgaagcaacatctggattatacaggaaactggtctaatttagtcagcactggagtcagaaagggaaggaggaggaaatttgggaatgttcaatagggcatgggtttggatgtgcagaaaagagactgtagtaattgacctgacatgtctgatcattgaagagaaccatcagaaaatgaagcaggaaatagtaagaaatgggcttaatgttaggaaaaatagctccttcaggaaagagatgtataagaaggatgcagttcactggtaaggtataggcagggattctcagggaactaatgcaaagggagtgggtcattcaaagaaccctcatggttagagtaaccgtattctggtttgtccaagacaatgccagttcacaaagtcattcttgcattattaatggttccctttctcccaaaaatttacagtttttatcatgtttgtagtcaatactcaaaaaacatgtgtgaggaggcttttgcttrttagaactatgaaattgcttttaggttggcagagcayatgaaagccatttctagacttagtttgaaggggatgacatctcttgaaaagagtcagcacaggttaataaataacccttaagagctgcactggatggtttaaggcccaacttttcaccacggattatttgcatgaccttgggtaagttacaagttacataacctctcatttcttcagttttctcatctgcagtgcaaaggtaataatagtatctacttcatgtaatgtggtaaggcttaaatgagtcagtgaaaaaaaaaaagtgtgtgtaacattgtggctatttactgctaaactggttccattctgcatccagtaaatgtaattcctacggattttcaggtggctctttgatctgctgcattaaaatgtggttacaggagaaactggtaataaactaagagttaggcctcaaatagtttaaagcacttttcaaatgcaaaatattcttaacctgcattaatttatgagttgggtatcattttgctcttaatgctttagaaaatgatttaaaatttttaagatttgactcattcttcagattaatttttttcctatctcaacatccaagtattttctagaggattatatttttggtgtattgtggaacttttctgattttacaacacacaacataaacagaatcattctctcatacctattcgtcccttccttcaacttttgctggattttccgtatgccttgttattgtatatctggtcaagccatttggtacaaaacattttttaaaaacaaatcttttttatttcttggtcatgttaatctattccaagagagtgctagttatattccctccttgggcataaaatctatgtgttgttgtcagtttctttgttctgtaattattactgcactcctttaagaaaatttaactatctgatgagcctaataacattacttagtcactagaagcttaaaggtaacaatataaaatgtatattttttatattttcagtactcttgagactcagccaatctttcaagattttgtgtatttgtcaagcactctatgacctcgtatattattacacactatacattctccaatatattattataaattgtaycaccattcaaatctccttcctctgtttgtgtgtgtgtgtgtatgwatatatatatatcttccagtgtgtgtgtgtgttgtgtatatatagatagatagatagagaatatatacatagatatagattgagaatatatatatatatgtatagagagagagagaaagagaggaagacagatatgtagcaactgggtattactaaacttcagagttcttaaattatacttgctttactgtgcatgttaaaaaataatatctaagcctaaggcattgattcacatttttacagcaattactggcagtagcaaatactattaccactaaagaatgaagacattcctcataaagactactttcccctccctcattccactccagccacattggccttcttattgttccttgaacacacagagcatgcttcttccttagggtattttgccttagctcatttcttagactagaacattcttcccccaattaattttacatatggttactaacccccttccttcaaaaatttgctcaaatgttaccttcctcaacttcactactctacactatttaaagttgcaacctgtcccccacaccacttgtttcattcctattatcctgctttttttttctctgcatagcattttcataccttctaatacatgatactatctaattatttatatgcctatggttaatatctgtccaccccagccaatatgtaagtgacagaagacagaggtttgcattgctcaacaacatatttgtagttgctagacaaggggttagcaaagagccagacagtaagtattttaggatttataagccatatagtctctgtctcaattaaactttggcattgtggcctgaaagctggtatagacaatatgtaaatgaattggtgtggagctatttcaataaaacattatttatgaaaactaactataagctggatttgacytgtggacttttgagacaatatctggcacatagaagctcttaaagaatatttgttaggccgggtgtggtggctcactcctgtaaccccaacactctggggggccgaggcaggcagatcatgaggtcaggagatcgagaccatcgtggccaacaaggtgaaaccccgtctctactaaaaatacaaaaaattagcctggcgtggtgacacgcgcctgtaatcccagctactagggcggctaagacagaaaaatcgctagaacctgggaggcagaggttgcagtgaacctagatggtgccactgtactccagcctggtgacagagtgagacgccatctaaaaaaaaaaaaaaaaaaaaagaatatttgttgagtgaatgaaatagatttattgaaacctggcatatttaggatgtgagcataaattactaataaatttrccctttctcccaatccaaaattgacaatcatttttttcatttaaaatattgacactggccttactgcccatcataatcaaaagagttccctgtcctgttaaaactatagtgcctgcttgcatatgacagaggaactgtggtagagtagttatcagaatcagaactaggagtgaaaggctgtcctaggccagaaggcaacaaaaccttgaattcaggattcatattaaatatatttgttagttagtgcttttttttaaatttaattcctgaacaacaaaagtatattttcagtatgtgaacatatcatgatttatacagcctataatgtttttcttatttcaactgtgaaaaaaaaaaaaaccagattttcttatttcttgagttaattgtaaacttgaagtgatggcaatggacttgtaacttattttctcattctgcagtacatttccaagccactatacaaatgctgagtcattagtgtcatagtgctgtgtctatttatagattttttttatgagtgttattaaccataaatgctcaatatgaaaaaaatgaaggaaagtagctttgtctaatcacagtagaacactggatttattctataacaaactgaagggtgacttaatcacctcaaattaaaacttgttctttatctcacatataaattgaaattcattgcattcttatgtttccaataaatggcagatttctccattgcccagtaactttaaggtgattgtttgctcactataaatagagatatgtgtgtttatgtatagaaatccttcagcgtgagagttaaattactccatcttaaagaaagaaatgcattaatgtacaaccatggaaggtgtgataagtttaggtatatcatccatcctcacagaatctgtttgcagttattggaataaaattattttctttatagagatctatttaatattgttatagacacctgcccatcataatrattaaatttttattgataaaaacaattataaatatgtataggtacatgtgatattttgatacatgcagataatgtttaatgatcaaatcaaggcattttggatattcattgcctcaaacatttattattactttgtgttgagaatattctaaatcttttcttctacttattttgaaatatacaataaattactgataactgtagtcactcttctgtgctattgaacaccagaatttattccttctaactaactgtatttttgtacccattaaccaacccgtcttcatctctcctgccattcttcccagcctcttgataatcatcattctcctgcctcagcctcccgagtagctgggattacaggcacgccagcacacccagctaatttttgtatttttagtagagatgggatttcaccatgttggccaggatggtcttgatctcttgacctggtgatacacctgccttggcctcccaaagtgctgggattacaggtgtgagccactgcacccagcctattttgtgaaatattatgtttattatgtgttagtcttaatttgatttaattctttacaatggggtgtcttcgttccctctgaaactgttcccccatttgtagcatacttttacattcaagtaaattatttaccaatatgttcttagctgatattacaaaggctttattcattcattcgtttaattattaatgtattaaccaacacttactgaatgtttatcttatgtcacaacttggtgatcaaaggaggattcttacttaaaccattatacttttctgggacatatatattagtaaaaaaatgatttccattccatttaaagaacactgggacagatgtatgcatgggctgtgtgtgcatgctgtcagtggagcaccccatctggcctgcggcagtgtccccttggttctgatcaggagaccttgagctttgccacttagcatctcagaagtctccctcaggatcttgaccttgcttcttactacatgttctttctgaagatttcctctatgaagtccagaacttttatgatttcatttccatttctcacgtatcagttttttttattgaattctctccatcttttacattaaaatctttctttagttcatcatctatctaataacagatacttacttcaccagactcatctttgttatcaatatttcctttaactttcttaggttgtcagattttaaacgtcgacttaggtatactttaaaaaacaagagaaaaaaaggaaaaagtcgcaaataatccagaaaacaatataaaaataatgttataattcaaatcaaatacgcactgtgagcattcagtgtttccatggatcttctaataattttttgttgttgcttttagattttttgttttgatttgattgctgttttactttttgctatagatatgcagtttttattttgatgatgtttttctttttctcttgttctttttactcaaagacctccagtgataaatgatatatgtaagcatacatatcctaacatatatatttgtttttcaaacttagtatgtggtagtcatcataattagataagactgatgtttctcattttgattatcaggaaggtttgtttgaagcaaattattgtggatttttttatgtttgctgcatttgtacttcttacacaatcacttttaattaacaatgcatagttgtatatttgctaaatgtaaacactatgtaagggggtaggaatttattgttcagaagatgagtgcatagtagcaatgaagcacatatatcatatttgatttgtacmctggttttgtggatcacaactatgagacagtggaaaaaccatcaattccatgtaaaattggtgcccaaatgttaagtgatatttatagaaattataactggaagctaagggcagaaaatggctctaagatataagtggcaatagcagaaatatagtattgaaagatataaaagggtagtataaatatcttataagtaaatttctttctttccctaggaaaaggacatagtgaatgaagtcttttttttctccaagtctgacagtgcctcaaacattctaaaataatcttttctcccctattagtcatcacttaagtgtgagtttatttgaagtgattttgatttactgataactcattttagttactcagaattaactccctgcggaagacctaataacaatcagttttatggtcatgtgcattacctttccccatgatatggtttggctttgtatccacacccaaatctcactttcaagtgtaataatccccacgtatcaaggacaggaccaggtggagataattgaatcttggaggtggtttcccccatgctgttctcgtgttagtgagttctcaygagatctgatggttttatttattttatatatatgttaggatatgtatacttacatatatcatttatcacctttgctcaacactcattttctctcctgccaccctgtggagaggtgccttctgccatgtttgtaagttttctggggcttcgcctcccatgcagaactgtgagtcaattaagcctcatttctttataaattacccagtctcaggtatttttttatagcagcgtgagaacagactaatacagtaaattggtactgcattaagtggggtactgctgtaaagatacctgaaaatgtggaattaactttggaactgggtaacaggcagaggtaggaactgtttggagggctcagaagacaaggaaatgggggaaagtttggaacttcctagagacttgttgaatggctgtgaccaaaatgctgatagtgatatggataacgaagtctgggccgaggtggtctcagatggagatgaggaacttgttgggaagtgaagtaaagatcactcttgctgtacaaaggkactggtggcattttgcccctgccctagagatctgtggaacttttaacttgagagagatgacttagggtatctggtggcagaaatttctaagcagtaaagctttcaagagaaaggagagcataaatgttgggaaaatttgcaggctgaagatgcaatagaaaagaaaaacccggccaggtgtggtgactcatgcctgcaatcccagcactttgggaggctgaggtgggtggatcatgaggtcaggagatcaagaccatcctggctaacacggtgaaactccgtctctactaaaaatacaaaaaattagccagatgtggtggcaggcgcctgtagtcccagctacttgggaggctgaggcaggaggatggtgtgaacccaggaggcagagcttgcagtgagccgtgatcgtgccactgcactccagcctgggcaacagtgcaaaactccatctcataaaaaaaaaaaaaaaaaaaaagaaaacccattttctgaggagaaattcaagccctatgcagaaatttgcataaggaggtgaatgttaatcaccaagacagtggggaaaatgtccccagggcatgtcagagaccttcacaatagcccctcccatccaaggcctggaggcctaggaaggaaaaatggtttcatgggctgggcacagggacaccctgctctgtgcagccttgggacatggtgccctgcatcccagctgcctcagctctagccgtggctaaaaggggccaaggtactcctcagaccattgcttcagagggttcaagccccaaaccttggtgaccttcacatagtgttgggcctgtgggtgtacaggagtcaagaattgaggtttgggaacctctgcctagatttcagaggatgtatggaaacacctggatgtctaggcagagtctgcttcaggggtggagccctcatggctcactaggcgatggcccagtggggactctatatggggcttcaactccacatttcccttccaaatgggaagatggccaccatattctggatcccagaatcatagatccaccaacagcttgcaccgtgcacctggaaaagctgcaaacactcaaccccagctgtgaaaccagctgggagctggcctttatcctgcaaatctacaggggcggagctgcccaaggccatgggagcccacttcctgcaccagcgtgccctgaatgtgagacatagagtcaaaagagatcattttggaactttaaggtttaatgactgccctattagattttggacttgcatggggcctatagcccctttgttttggccaatttctctcatttggaatggacgcatttacccaattcctgtacccccactgtatcttggaagtaactaatatgcctttgattttacaggcttataggtggaaaggacttgccttatctcaaatgagactttggacttggacttttgggttaatgctggaatgagttaagactttgggggactgttagaagggcacaattgtgtttttaaatgtgaggacatgatatttggtaggggctgggacagaatgatatggtttggctttgtatccccacccaaatctcaccttgaattgtcatattccccacatttcaagggtagaaccaggtggagataattgaatcatggacgcagtttccccctgtgctcttctcaggytggtgagttctcatgagatgtgatggttttaaaaggggcttcccccttcactccacattcattctttcttctactgccctgtgaagaggtgccttccaccacgattgttaagttttctggggcctccctaggcatgtgaaactgtgagtaaattaaatcttttttctttataaattacccagtctcgtatttcttcataacatcatgagaacagactaatacaccccagtccgatgaataatttcagaaaacatttcagagaagcaaaccaaaataactacaaagccaaaacacaaaagaactctacaggcacatattttaacccttgagaatctgccttaattgtgaacacagaatcaaaattcaaggttcttactagggatgataacctttcctacactttgccaatcattgtattaattctgtgacagaggctgcctgaagtacatggggaggggtggggggggcgctgtccagtttttaaatggttgagattttacccttgttccaatgcagcccttggagactatgcacttgaaccacattttattggctacttatagagcttttttttttttttttttcctgatccgacctttaccatcatgtgttttacccactcaaacaagtattctaaagaagaggtgtacagaatgtgctatttggcttgttttaacaatgttcacaaggttgttctgaaattaaacagtatgtttctagatagctggattgatctttaactgtggacactgtaaatcttaaagttgaacatgtttctttttaaattttgaccactagcttaaatgtacagccatttagtaattgtacataactgtgtggcatgttatctgtgcgttaatattactcctcagttttttaatttgcctaaccactactttctttcttcaaaatattcaaatcttaattttgacctttaatatatatgtaaatttcttccaaccctttgtggaagactagcaatcatggtcctgtcaaaacagaaattataccttaatttgaacaggaaaagtttaatataaaattattaactataacagtagttttagataatccagcattagcaagtacataataaagagaagtcaaaaaaatataggaatagcagatataaggaacaaactttactcaaactttactcataggactgagataaaacaactacagaagagcccactcaccctaaagctgagatctagatcttgctgaatagcgtataattatggctcattgaatggcaaagaagtcactgtggtagtgcattggcggaatttactggaattctctcctctggtacttgctggaaatctacactgtacagtgttgaggaatggtgtttatgtcaatatatcttggaagggacactcttctacgagactacttaagcagattcctaggggaagcttctggccactgagtgctgcaggcagtcatgcactgcaagccatggtgctgcagaagccagatactgcagaagctgctcacactctgagtgcttagtgacagagaagctgctcacattgcaggagactgtttagagaacacatcagaactaggaaagaaaaccttcatctctggcaacggctctaaccctttactgacaaagcttaacatcatgctagctaggaagaacatttaatgttcccagctccttttttgttgttgttgttttttccagaagaggaaaggaagggtaaatgaagtaggacaattaattgacaagtggcacaaaatccttgttacaagcaaataattaattgtatctttgctttaatttgacaatgtgtgattttcagaaacatataaaagtttttgtatattaaaaagaaactgatatcttactatagagcgatttatacttatggttcaaaactctctttaggttctggcaggtgtattcattttcctcaaggctagtgatttgagagagaccctaagctgcttgcaagattagacaactgtatttatacagtgatttgggatgactttgaggaggagcgagagataaagtacggaataaagaagtacaaggtttaaatatatatagtatcaaaacaacagcaagaacaaccacaaaaaaaaacaaaaacaaacatataaagatgtagagtccttcttctacctctgttcataccctactaatttactggctttgtattctctgtaaggataagctatttttatggacagagcagagaatgaaagtttatacatagtatgggcaattttcttctggcacaataccctttagagatgttcatttttttctagtattttcttcattttcaagaatttgtaaataaaaacaaaaatctttggaaaaagaggaactcaatgaaccaaagcattgaagcattgctcctataattcgttttagtgattaataaaagtacaagaaaatcagacaagatgtaaatataagcagaatcatgattaaaaatccaatttaacatttaagctacaaattaattgttatttttgatcaatatgttattgattcttttcactgggtcatcttgtgttttctctgtgctcgtgttttaacctttatatttgaaaaacacatttaaactatgtaagccaatacttttaaagaccagtattttttatttattacaattaaaacaacttcaaaatgaacatgttggtttaaacaaaaagactttgaaaaagtctatatacactttggaaagttctgaggaataatacatagtgtttctgatctcttgtgttttatttcacatttcataaacagcaatctccatagtagtacaacttttatggttgtccaggaggtaaaactaattcagatgagttatgtaaaatatatttacacaataaattcagtaaaggtgtaacaataaaccatgggaagagggggatgcagcccacctaccccaattataaaagccaataaacccattcatctatgatatatattttaggacatactatatgcatgtcaaaaggaaagttcagagaagtatatagtatagtatggctcctgattacagtgaatttgaattatcatttatttcagtctaccaaatgtacaatgaactgaaatattccaaccattcttcaagaagctagagatacaaaaatgaacatgatatggtccaaatttctgcagaaatagtagtgaattttcaaataygatggtaatgcaatatttcatggatattgttgagttctaatttagatcttgaggaaagggtagtctttagttacaaggtaaaccagtttggctggaatgcaaatcctggataaggatagtgagctggaaggtacagtatccatgctggaattaatagtatagatttactccaagtaggtgtttcatgcaaattctaaaaccatatatttcaagtgattgttgctttgttattgctcagataatgtcttataaacaattatccactctatgcctaaagtcattttttgcattgctattttattttaggaactcatgtgcaactgctttcaggaaatgattttttaatgtctactacaaattgtttcggctaagacacttccctgagttctctgttgctgaaatttggcctgaatactccacttttccatcctccaagayctctatcatttgagatatttcctttttcttacttaatggtataggtggatacagcctccttaccttacctctttttttcctagcctgaagaagagtactcagaacttttttttttaatttagaatttattgatcttcattataagattgctcctatgatctctaggctactacattactgtataaatcattctcacactgctataaaaactactggagactgggtaatttataaagaaaagaggtttaattgactcacagttccactggctctacagaaagtatggctgggaggccttaggaaacttataatcatggctgaagggttaaagggaagcaagcaccttcttcacatagtggcacgagagagtgtgtgtgtgtgtgcgagagagcaaagggggaagtgctacacactttcaaataaccagatctcgtgagaactcactcacgagaacagcaagaggaagtctgcccccatgatccagtccagtcacctcccaccaggtccctccaccaacattggaaattacaattcaacatgagatttggctggggacacagagacaaaccatatgaatgaccagtcagaatccaaatagatgactacatttgttttcattctctgaagatctcataccaccactttgcttctaccaccaccactgctcacactaccattagtggagactagggatctagaaaacagaggtagggagcctcagtactatttgctcaatctatttctttatttttagttttggaataagtctagctttggaaactattaaacatagaactactgtagaattattaaataaatattttgtttattatatcatttcctcttgcaagaattaaagctaaagaaaaaatgaaaaatatttggagtttagatattaaatcttagctggtttccactagtaacatattttgcatttttatgtagtgcaatcattattcatagagttcttcaataatatttacttaaaattattttttcaccagccttttaactctaaartgtgttaggaaaatactttttttcttggagataagtgatatttattaattgattaatatctttatgttctggcttcactattagatgactatttactaactctgtatcttaacatgataagaaataattatttgaaatcacttcatataaatgaagaggctatgtctttggaataagtagttagagtttagcattattcacagtggcattttaaatatttatctacttgtgcctcattgccttcatctattacatgtgaatgacactcattcatttcacacattcattcattcattgaacattttttttcagcaactaatttatatattaatatgaactaggttagcaacagccaatgcagaggaaagacaaggcattgtcaatatatttatagcactcatatttctactttcaaattaaattacataacctatgcaaaatattaatttaatacacattcaactcaatttggttattccccccrtcttcctttcttccttctccaatgctaattataaatgacagcttcttgctgattgggctcaacacatgagtcatataccaatggagcagatggagtagcttccttgttctgttttgtttaagctgatgttgatttctaatttctaatgtacttcatttacttataaattgttattgctgcagttattattttgcaagactcatttataagataatatatagaaagtaacattcgatgtatcaaatttttaaagctaattttaaaaattaacttgacatcttgactttatattcttgatagtttcacttaaagaatatataaagtgattttgaaatttcaaaarcaagtatgggaattaagatgggttttgtggagaataaagtgggtctgataaattaatccattcccctgggttcagatgctatgttttataatgtggtagaattatggaaataaccatcttccccgacgtaaaagaagtatggcataataacagaattctagactaaaaacagagtattaagatctattcccatttataactcataactcattagcttgtgactttaggaaatttgcattatttcattttccacagtttctgtctataaaatagaaataacaatatctttggatgcttcaaagggttattgtaagaataaatgaaatatatatcaaaatgtattctgatatgtataaaatgccataatattttatcagtgtgaacttccaaatctctatgtaggggaggcttagaggttgcaatctggttggaagtagactctggcagggactcattcggagctggatttttttttttttttaagactrcaatgttttggtcttagactttttttgtttttccttaaaactaccatgataggcatgctatcttttacttcaatcgcatattaattttgagggagttagagtgaggctggaattctggggcttaaactgtgttagttatctctatctttgtgatagattatcctaaattacaaaatttattatctcccaatttctgtgaatcaggtatctggaagtagcttagctgagtcctttggctcagcatctctcataaagctgcattcaagctggcctgcagttgtctcaggacttgactggggaatgacccactttcaagctcagtcacatggtctttggcaggatttagtttcttgctggttattgaatggaggccacagttcctcagtagctgttaacctccttgccacattgatctctccatatgtaacggacaaaatggcagcttatttcctctaagggagcacatgagacgagtccagagaatgagagcaggacagaaatcacagtattttatgacctaacctcagaaatgttatcccatcacttttgctgtattctattcattagaagcagattaccaaatacattgcatacatgagaaaggaaaattacataaagtgcatgaacaccagggagcccttttagtagctacctaccacatcagccacatgacatagattatgggtttttcttgctccttctcaacctccaactgtcataccaaccatggaatatatatttttctttgtatttctatgctgggtctaacatgaagaacaacaggagaaatggggaaatgtaggtcaagggatacaaggtagtaaatatgcaggattaacaagtggagagatctaatgcacaacatatggactacagttaataatagtgtattgtattcaggatttttgctaaatgagtagattgcagctgctcttgccatagggagaaaatgggtaactatgtgagatgatgtacaagttaatttgttccacatttgtaaccactttactatatctacatatatgtatcttataacatcatgttatatgccttaaatatacccaataaaagttattttttaaaaaagaacagatagccatttcccacatctaaatgcagtgaagtacagtaacagaattctagcctagaaatggaatgttaagattgagccccatttctagcttattagattgtgattctagagaactcactttatctctttttcctatatttccatcctgaaatgggaaaaaatggtatttcttattgcttcaaatagtagttattcctaagaacgtagttgcccacattatgatttgaacaaagatgaaagaaatattcacctcagtaaaatttcatcacaaatcgcttaagtaaaaatggatgtcccacatgacagagcgtaccaggttttctcagtttcccaaacatacagactctaattgctttttagatcaaataagacaattgcacacatagaaccttcaacctcagtggtaatatataaaagttaattaaaccttttctatttgttttcttcaaagttcaaattctttacgttaaggaatctaaatacatttgatttggagatagtattgcctgtggtatttcaattattaatatggagaataaatatygttattcatgtgctgaagtgacttttccacttcaaagtggtgtctgtaaaggaaaataatgaataaaatctgcatttcttacctttaccacgtctatggtcacagacgcaacaaagcctaatctgataccataatataatttagaagtattttattatggcatttgatatatgcaagtactctacagaattgataaatttatactttttacttaggaaatgattctgccctccatatttgcttatcatttactgccaaagaagggaggaaggaagagagggaagcggaagagctgtaagaaatagtgacttatcagattgggagtaaaagacaaatacatatggctcttgaaaaatgacctagaggtcaaaagatattttgcagtgcatttatgattttcacaagtttttggcacctacttgacatttatgtcttgaaagagaaagatcaaaatgaaatgtgaatgcctaatttcactagtctaatgtttgaagtgacagaagtgaccagtgaccaggacaaattcatatgtagcacacagaaactgatcccattctagtcttacttctgacacacattgttgtttggcacaatggaattaactaatttctctttccctgaatctcatctgtcatgtcaggctaaaggaataataggggaaacataattttagttactgtaaataaagtttatgaatttcacattgtggaaaaaatgttattgtccactcaatatatgtattttgaaggaatattgactgcatatttaattaatttctctttcaaaatcatgatacaactacagtaattgctctctttatgggaaaaaggctctttctctagcgaagctttatgattcataaacactgacaaaagattcaaggaattctggcttatgtaattacygggcatgtatttaattgttttccttggaatacttgtttataggatgatagaattaaaaaataattgaatcctaaaatctgaacttcaaatttctatttctctctgatattatgattaatatagctatttatttgcaacagttctcagatcattgtttttctttataagacaattttgtggtgcaagtattacttaatacaaaatacattaataaataaagttaartgtaccaaagcagatgctgctactaaacacatgtttctttgctagaatcaagatatatttaaggactgttatgagattaggaatcaaagtgaataattttggatctttgccgttgttgaatgaatttattgttttttaacacagattttatttcatatgtatggcttagtcctcaaataggtaagacttcactgagacagttgtatttaaaaatttgatataatttttatcaaacagatttgaatttgaacaataagtactagatttgaggtatgaaaatgtgagcctttgtgtcaaaattaaaaactttttggcattaaagatgactatcaagaaagtgaagacaaccaatacaatgaaactgtttgaaaatcatgtatctgataagagacttatatccagaatacataaaaaatttgtataattcaacaataaaaagaaaaataacctagttttaaaatgggcataccatttgaatagacatttctcactgtaagatatatgaatgtccaataagcacatgaaaaatgtgatcaatataattattcattaggaaaatgcaaacccaaaccacaatgagataccacttgacacccactaggatggctttcatcagaaagacagaaaataaaaaatattagcaaggatatggagaaattacaacactatactttgctgttggggatgaaaatgatgtgactcctttggaaaaagttttaatttttaaaaatgttaaatatagagttaacattttttgatatggtaatagtttctacttctagatgtgatgcaatatctactcctcggtctatacccaagataagtaaaaatatatgttcacttaaacctgtacctgattttcatagcaatggtattcataatagctcaatgtggaaataatgcaaatgttcatcaattgattaatggatttaaaaatatggtatattcatacgrtaaaacattattcatccatgaaaaataaaacactagaacatgaagtaaacttgaaaatacgcaaagtcaaagaaggcagagagaaaaggccatatatggtattattccatttatataaaatgtccacaataggcaagtctatacagacagaaagtagattagtgcttgtcagggaatggaggagtggggaatggggaatgatagttaatgggtatggagtatttttttaaggtgaggaaaaatgttctggaattacatagtggtgatggttgaacaactctgactatactaaaaaccactgaagtgtacactttgaaagggtaaattttattgtatatgaattataactcgataaaacaattatacaaatgataataaaaaatcagcaagtaagtattgatgaattaggatatgtgccattcgggaaacaaacaagatccaaggatagtaatgcacagggatatattttagaaattagtttatgttggatttttcaaaagcagaaaaagatgcaaacctctgagttttctggatttaaaattgaatgcagaattgtctactaatgatatgagagttacaaaacttgaactaaatcaaaaagccagtgctaagcactgagagatgtaatgtgtatttaaattagtccctgcagggtttgtagcttatgattctaataaataaattccaaaagcaataacacagtattatgtataatgattgatgtcccagtgatataaacatgcagctataggattatacttattttgcttatttaaataactgagaggttacattttaggagaaataagtaatctctaagtacacatttaagaagctttggagttggcatatttttaaaatttgcccttgtaatagaaaaggccgttgattacttgcttttaacgaattagtaacttttgcttgatgaagtaaaaaaggtacaaaaagttaactaattaagcaagtgacaaagaaaaagcatacaaaattcttgtagagttatcacaacttaattaactcagaatatccaataataatcactttaaacatttaatgtactttgtgaatactatgtctcatttgacccttacaaaatctgtgagatagggcatcagcctatatttccagatgagaaaatagagaaaatgagattaaatgtaatatttcatagttggatgatttcttagaaagccatgatgaaaaccatggatctcctgatatgatgactcatatatatatatatatatattttttttttttttttctgttagactagtgttgattgctcagtgatattggtgggattggagtggtaggagtggtagtgatgaaagactaaaaggaacaatgttttgataaagaaatatattagagtccatttttcacagactaagaataggtagttcaaaatctgagaagtaaaaaattaaaaacataaaaactttgtagaacaattagaagatacatttctgagtacaatttattataagattattgtgaagtaggatttagttatttatttaaaaaaactcagaaggttctcagcataaaaatatatgttagcaattagattgtgttttcatatgcacttaaaaagtgtctgggctggtactgtgtccccaagactagtaaataattatgtacgttagaaacaacctaccatatggtccctcttctcaaatgaaagtcaattactctctaatgaagcatttcaaaagcattttggccattttccaaataaatcattattcaacatttctttttagtaatgacaactgacttaatggtggccctggttttttatgcttcctctcttgccttatgtgaatgtaaatctaatcctacctttaaagacaacaggatgtcacagtacagcacccttagctagttcaaggcatgaaacaactctatcacttaaggattttgtgatggcagcttcacattagtccagcaattcaagatggaaataggacaatgtaacagaggacacaaaagctgttgctttatgactgaagttgcaggatagaggtgagccttgattctgtgttatgtagctggactccacaaaaacgctactactactcagcatattatgcactcaatagactggcctggtttggaaatgatgccacagtttgccccatcattacgtcttctctctcttttattaataaactttaggttcagaaaacccgtattacagaagcacactacaggagcacactattttttgtctttttttttttttttttgagaaacaatttctttttattattattattattatttaagttttagggtacatgtgcacaatgtgcaggttagttacatatgtatacatgtgccatgctggtgtgctgcacccattaactcatcatttagcattaggtatatctcctaatgctatccctccccgctccccccaccccacaacagtccccagagtgtgatgttccccttcctgtgtccatttgttctcattgttcaattcccatctatgagtgagaacatgcggtgtttggtcttttgtccttgcgatagtttcctgagaatgatgatttccaatttcatccgtgtccctggattacctgatgtaacatttttccttcttttatttttcacagaaattattttattaacatctttttcttttgagatatagagtagtgagttcctgtaatattcaaacaaacattattcacaggaatcattattttcctctgcctccagttcaataacaattttctttttcagtcagatgatagatacttttacatatcacatctcactaactcctaaataagtgtgatcatatatgtttctattatacacccttttcgtttcctttatccctcatttttctttgcgtttctttttttctttttacagcaaacaaagctctttatttagctatctttaacaatgtagtaaaattgtaatttttgttagatatttaatattgttattatccaaaataacatttgaagattgtcacttacccaatcagaaaaaaagaaagaaggaagaaaaaagcaaaaaggcaaagaaagaaaggagacaaagaaagcaagggaggaaggaaaggaaaaaagattgttaagccttcatttcttaaaacttgaaacatatttgcttactctaagtggcagcatggtagttctatgtaaaaacactttgtcattaaaacaccaacaaaagccctttagcgctttgttgaaccagagaatctcatctggatcagatttttttctactttattcaattctacctatcacgtttttattttattttattttattttattttattttattttattttattttattttattttattttattttattttattttaccaccatgagctgtgctctaatatcactttcttatatcagggctcttcatttccatcttttccatgtcaacttgctcactaatgttttcatgggctaggatcctcccatattttccatgaactgctgtttgtttgcttcagcatgcttgcttgacaacccacatcctttttctaacctgagtgctctatgcttgctttctacatgcctctgtgataaacagattcttttattctgcaatgtttgtcagaaaagaaagaagttggatttaggttatgctatggtttgaaagtgtcccccaaagttcatgtgttggaaacaacctccaatgcaacagtgttgacaggtgggacctctaagaggtggttaggtcatgagggctctgctttcctgaatggattcatgttgttaccctaggagtaagttcgctatctaaagagtagttttcttatactatctctggcaagctctctctccatgtgatacctcctaccatgtgatgacacatcaaaaagatcatcataaggtgtggccccccaatcttggacttcctagccttcagtaccattcagccaagtaaacttccattgcttataaattacccagtttgtggtattctcttatagcagcacaaaacagagtaaaactgattctcagtgaaaaatagatctatagatgcaaaacatcccttgacaatctatgggaagagtggttatttcttttttgattattgatgttcccagcaatctaggcacaatctctggtccaataaatatttgggactagtctactgcaagtcgatatctgttgaactatgctatgtctagcattcttgtaggctaaaatatcaccaatatcttttctttgtgtttccaatgacttgtaattaattacatttctatgactgctggtaggtgttctcgagaggttttgactattaaatattaaatatcaagagataacttttccatatgtctgaaaatttcaatgtcataagacccttargtttttgttttctttattcatctaggcagcactttttcattttggtgaatccaatatattcttttccttgtcagttgactattttagctttaagaaattgtaaaatcatgtaaaattgatgttattttatagacagagtaattgtaatacggcttgctcagttgcctaaagatataaacatatattgacaggaacaggctagaaattgtcttcagatgatcactcacaaaaccaagtgcttttgctatagtcatgaataaggatcaagaatgaggaagataataacacaaattctctctagaatttcttgtagagctatttcatttcagtttgccatagttttgtttagtcagaggtgaccttttgagcaatgaaaagacaattttgccttcaattgaacactaatccctactaattagaatttagaaagtcatgtttttttaaatgtctaccttccagctgtcatatctctgatatgtgtttgcctttattcttgttggtttcctattgattatggaaacattagacttagtatctcacacactaattcaggcaactggtaggcatacatacatcagtaaagtaattcattttatccttctagcattatatcctcctatttttttgcccatttacacaaataatcatttcagtatgaaagatgttataaatcatttaacacctaggggacagttacaacaacaacaatgcaactttatcttctcaattttttttatttccttatccctctccatacacattttttactgcctgtattagtccatgcttgcactgctatatagaaatacctgagactggataatttgtaaagaaaagaggtttaattggctcatggttccacaggctgtacaggaagcatgatsggttatggggaggcctcaggatactttcaatcatgctgaaaggtgaaggggaagcaggcatgtcttacatggtcagagcaggaggaagagggaagccagattttgcagtaactcactcttgggccaggacaacacccagaggaatggtttaaaccatgagaaaccaccctcatgattygattacctcccaagagtccccacctctgaaattgggtattacaattcaacatgagatttgagtggcaacagagatgcaaaccatatcactcccccatgcttgttccctcagccctctctcttctccttgacaatggctagcactgtgaattttacaaaactatggaaaattagaaataaattactaatttgctttgaggaaatatttgagcatgttataaatgagtgagtagccgaagtaatgaagcaaattacaaaggcaaagaagcattaaccttattttacaaagggtctttatagtcacttcccagaacagaatgtctgctagtgaaagaaaattaagatagaagagcaatgagatagtttgtataggcattagccaaaatcttcaatacaatttggaaactaattattgatcttcttctacttgtttcacatatcctttatttttcttaagaaaacccattaaatttagacttacattttaggctataagttgaatccataacataagaaattttcttgtgtgtagcaaggctatggatatgaaatttcttaagatgccacaaaactaatcagagattacgtagaataaaaaccacttccacttcactattttttctcatctgcagcagcagttcccaaactttttggcaccagggactggttttgtggaagacagttttttcatgtatcgggggtggagcagggtggggatgaaactgtgccacctcagatcatcaggcattagattctcataaggagcctgcaacctaaatcccttgtatatccagttcacagtaggattcacacccccatgagactctaatgccaccactgatttgacaggaagcagagctcaggcagtaataaccccttgccaactgctcacctcctgttgtgtggcccagttccttataggccacggactggtacaggtcagtggcctggggattgaggatcgctaatctagggcgtttaattagctgaattacttctattcgcacttgccctccccagctctcccctcctttgtagaatacagtgtgctgtatgccatccagaaggctttagatggctcactgttgccagttttgagagacttgacaggctcttcataaccaagcctcagaagacctgagtaaacttatttctatccactcactgtcaggcacagtacactcttaaaacaacagctccacacagcttctcagaagggaataaagaagccaaattaaaggtaattcatctttcaaatatttataaatatttaaccgcattcaatttaatagagaaacatgcttacagttttttaaaaatttctggatacgtagttgctatatatgtttacaggatatgtaagatattttgttgcakgcatacaatgagtgataatcacatcagggtaaatgagttatccatcacttcaagtatttatcatttctttgtgttacagacattccaattatattcttttagttatttttaagtgaacaataaattattattgattgcactcaccctgttgtgctgtcaaatactagatcatattcatcctatctaagtatatttttttactcattaaccattaccctcttcccccaatacctccactagcctttccagcctttggtaaccatcattccactctttggctccatgagcttaattatcttaatttttggctcccacaaatgaatgagaacatgcaaaatttgactttctgtacctggcttatttcacttaacataatgtcctccagttccattcatgttgttccgaaggacaggatctcattcttctctgtggctgagtagtactcattgtgtatatgcacaacattgtttttaatctatttgtctgttcatggacaattagattgcctccaaatattgactattgtgaacagtgctgcagtaaacatgggagtgcagagttcttcaatacacttattttctttttaaaaaatttttaattcttgtggatacagagtagttgaatattatttatggggtygatgagatactttgatataggcatgcagtgtataataatcacatcatgctaaatagtatatccatcttctcatgtgtttatcttttgtgttgcaaatagtccrgttatactctttaagttatttttaaatgtgtagccaaattattartaactatagtcaccctgttatgtcatcaaacacttggccttattctttctaactactttttgtacttactaaacatccctttttcccccaccactcccaccttactaccctctccagccttcggttaccatcttcctactctctatctcgatgaggtcaattttgttaatttgtagctctcacaaataggtgggaacatgcaaagtttgtctttacatgcctggctaatttcatttaacatgatgacctccagttccatccatgttgttgcamattacaggacctcattctttcttcatggttgattagtactcattgtgtgtgtgtaccaccttttctttatctgttcctctgtcgatagacacttcagttgcttccaaatactggctattatgaacagtgctgcaacaaacataaaaatggagatatacctttaatatactgatttcctttcttttgggtatatacccagcagtgggattgctagatcgtatggtagctgaatcaattttagatttttgaggagcctccaaactgttcttcaaagtggctgtactaatttacattctcaccaatagtgtacgagggttcccttttctccacatccttgccagcatttgttattgcctgtcttttgaatgaaagccattttaaataggatgagatgatatcccactggagttttgatttgcatttctctgatgatcaatgatgttgagcaccttttcatatgcctgtttgctgtttgtatgtcttgttttgagaagtgaatattcacatcctttgcccatgtttaattggattattaagttttttcctatagagtagtttaagcttcttatatattctagttattaatcccttgtcagttaggtagtttgcaaatattttctcccattctgyagttgtctgttcattttgttgtttgttttctgtgcagaagctttttagcatgatgcgatcccatttgtctatttttgctttagttacctgtgctttggggtataatactcaagaaatctttacccagaccaaagtcccagagagtttccccaatgcattcttttagcagtttcatagtttgaggacttagatttaagtattatttccactttgacttgatttttgcatatgggtagcaataggggtctagttttagttttctgcatagagatatctagttttcccaccaccatttgttgaagagactgtcctttccctaatttatgttcttgtcacctctgttgaaaatgaatttactgtagatgtatgaatttatttatggattttctattttgttccattgctttatgtggctttttttttctgccagtaccatgctgttttggttactatagctttgtagcgttaagttgaggtcaggtaatgtgattcctccagtttygctctttttgctcaggatggctttggctattctgggtcttttgtgactccatctaaattttaggatttttttttttctatttcagtggaaggtcatcggtattttgctcaggactacattgaatctatagattgctttagctagtatggacattttaacagtattgggtcttctaatccatggacatggaatatcttttcatttttttgtttcttctttgatttctttcaagaatgtttcatagtttttattgtagagatattttacttctcttgttaattcctagtattttactttatttgtagctattgtaaatgggaacactttctagatttctttttcagattgttcactcttagcatcaagaaatgcacagattcttgtatgttgatttttgtatcctagaagtttactgagtttatcagtttgattgtttttagtggaatcttcaggatttttcaaatataagatcatattatctgcaaacaaggataatttgacttcttcatttccaatttggatgtactttatttctttctcttgtctgattgctctagctaggacttccagtactatgttgaataacagtggtgaaagtgtactcttgttgtgttccagatcttagaggaaaggcttttagtttttctctgttcactatgataactagctgtgggtctgttatatatagcttaaattgtattgaagtatgtttcttatttacccagtttttttaggactttttaatcatgaaataatattgagttttattaaattctttttccgtgtcagttgaaatgatcacgattttgtccttcattttgtttttatgatgtatcacatcgatttgcatttgatgaaccatttttgcatcctggagataaacccacttgctcatgatgaatgatctttttaatgtgttgttgtgttctgtttgccagcattttgttgaggttttttacatcaatgtttttcagagatattggcctgtagttttcttttttgatgtgtctttgtctggtttggtatcagggtaatactagcttcactgaatgcatgtagaagtacttcctcctcctctatttttcttagttgtttaagaaggattggtgttagctctttaaatgtctgataaaatttagcagtaaagccaccaggtccttggctttttttttttttttttttacygggagactatttattatggcttaaatctcattacttgttatggtctattcagattttggttttctttatggctaaattttttgggttgaatatcctcaaaatatatttattttttctattttttccttttttaatgtatgtttgctcgtttctaatgatcttttgaatttctccactatctgttgtaatgtctccttttttttgtcttttatttcatttatttgggtcttctctctttttttttagactttttaaaggttcatcaaatgtatcttttcaaaaaattaacttttcattttgttgatcttttgtattctgtatgttttcatttcaatgtcatttatttctgctctgttctttattaatttcttcagctaattttacatttgcgatttgctcatgcttttgtagttctttaagatgtattgttagcttgttcaagttttaaaaaaaaatatttaggatcatatagctatacatttttctcttagtacttcttgcgctgtatcccatagatgttggtatgttgatccatgttcatctgtttcaagaaattttaaaatttccttaagcttctcattgacccagtggtcattcagagcatactgtttaatttccatgggcttgtgtagttttcagagatcctcttgttattgattttcagttttattccattgtagttagaaaggataattgatattatttcaaatttttttgtttttgaagacccttttgtggtctaacatgcagtctatcattgagaattatccatgtgccaaggaaaataatgtgtattctgcaaccattggatgaaacattctgtgaacatctattaggcccatttggtctatagtccagattaagtctgatgtttctgtgtggattttctatctgtgtgatctctctaatgctgaaagtggggtgttgatgtgtccagttatttctgcattggagtctatctctctttaattcaaataatatttgcttgtttatctgggtgctctagtgttgggtgcatatatatatttataattgttaatatcctcatgctgtattgacccctttatcattaaataatgaccatctctgtttctttttatggtttttgtcttaaaatttattttgtctgatgtacatagagctactcctgccattttctgcttttcattttcatggaatatcttttctcatctctttattttcagtgtatgtgtgtgtttatgggtgaagtttgtatcctgtagagagcagatagttggggctttaaaaaaaaatccattcagctactttatgtcttttgattggagagtttagtccatttggattcaatgttattaataagtaatgatttactactgccattttgtttctcgttttccagttattttgtattttttccttccttctccttccttccttccttttatccttcttcccaccttctatcctggcatactttttgtgaaagtgattttctctggtggtatgattacatttcttgctttttattatttgtgtatcrattgcagttttttgcatttgaggttaccatgaggcttgcaaataacatcttataacaaattactttaaactgttcaaaacttaacactgattgcataaacaacaaaaatagcaagcaagtcaatataaaatgaataaaaattatactgtaacttcattccatcagttttcttactttttgttgcttttatttatatcttgctatactgcctatgtcttgaatagttgtagttattactttcgattggttcatcttttagtctttctactcaagctatcagtagtatacatcccagaattacagtgttataatactctgtatttgtctgtcaacttactattaccrgtgarctttgtaccttcagatgatttcttattgcttgttaacatcctttactttcagattgaagaactctatttagcatttattgtagaacgtgtctagtgttgaaaaaaatccctcaaattttgtttgtctgggaaagactttgtatctccttcatgtttgaaagatattttctttaaatatatcatgccaccctctcctggcatatcaggwttctactaagtcccctgccaaacatattggagcttctttgtatgttacttgtttcttttcccttgctgcttttaggaccycttttaaaaaaatacttgatttggggagtttgattattaaatatcttaggtagtcttatgcgggttaaatctgcttggttttctttaacctttttgtacttgaatattgatatctttcttacatttcaaaagttctttgttattatcttttgtaataaactttctaccccgatctctctgtctctacctcttctttagggccaatgacttttagattttctcttttgaggttgttttctaaatcttacagactgcttcattctttttaattcttttttcttttgcctcctctgactgtgtattttcaaatagagtgtgttcaggtttactaattctttctttttctgaatcaattctgttggtgagaaactgatgcattcttcagtgtgtcagttgcacttcttagcttcagagtttctgctttggtgttcctgttgcgggaaccatcattggagggttctattttactatcttgttccacctccccagttcttgtaaatatgaaaccaaaatctttacaatggtattgacctttaaaactccttgcagatctgtaattgtaaacaaataatattttgaagctcaggtcattattttttatcttatgaggcacatgattggttatgacctttgaacaataatcttattgaatatgcacagatcatcttaagggttaagagtgtctaaggaaatatacattacctgccagatttatgtatatgtatgtacatttttgagaggaaaaaggcaatttttaaagctaacatttggggacaaacaactaatattaagctaaaagtaaaaatgccttgaccttcttatactggttctatttttctctttgtccctgatagtgacagatgacattcatagtcccaatgagcttttctcatatttttgatttatcaaaatgcatgatttaataactgtctttaattttattttcaaaatataggcaaacagttgcatatggtacggtactaaatgtgttaaagaaccttttgttccctactctatttcgaggtgaaagagaatgctaatgtaatgataagtaaatgattctttcacatttggctttccttccatcttcaatttaaaaagttagctaggtacccactcagaataattgaataatgcttctttctacctaacactgctgtagaagcatttatttcctctcatatttccagttatctctaggcacagctttaggtaatatcttaaaagttacaaaaatattttcttatggtatgatttcataaatcctttatcaacaaacgcaaatcattcaaaggtttgtatttgaagttttttaaataagcacataaagctagtggccatgtagcaaacctctaaattttttwaaaatgtttcttttgttcttatttttgtgaaaatttgttatgtctttcaactttagaagaagttttttttcccataaaaaaaaaatctcaccatggggtttctattttgatgctatcttgtggatgggacatttggctaggtcatcaaatggtctgcatctcaccagctgctgtttttccctccctcccaagaccttgagaaagtaacgtaacattcctaagtatctatttctaactttgtctaagtatttcacaaaaaacgaattcaacaaatgcttatagatgacttttgtattcataagttgattttctttaaaggaaatactaatcccttgttttcttctccttgctcatcttgtttagtaatttagaaaacccaatgcctatattaaaaaacaaaattggctgggtgtggtgtctcacacctgtaatcccagcactttgggaggctaaggcaggcggatcacaaggtcaagagatcgagaccatcctggccaacatggtgaaaccccgtctccactaaaaatacaaaaattagctgggcgtagtgatgcattcctatagtcccagctactcagaaggctgcggcaggagaatcacttgaatctgggaggcggaggttgcagtgagctgagattgcaccattgcacaccagcctgggctacagagcgagactccatctcaaaaaacaaaaacaacaacaacaacagcaagaacaacaaaaactgcatcatctctctgtatccatctctttatttctctctctagtatgttcccgagtgcttgagttctctaatgatctatggcatgaagcagcctttatcagcttggccacttgaacaattacgtgttgcacatcacatcaaagaaaagggggatgataaatgaatatcatcttgttttggtggctattaaatgccttcactttcatacaatgagaaatttgataaactgagttgagcctcatggttaatgacatttccaaattttagaatatccataaataatggaggaacttattataaacaataggggataaaacaaagaacctctcttctgacacatgagaacaaatgacttcacatctcmtctatttttagagaatgatgttgaagtctattcatttatcctctgttattcatttttggataaataatgatgctcttttaaaacctgaagtccaaatgccttaatacaataagatatgtgacattttataggcattttgtaacaagtcttgcatgtcactatagtgcggttacatacaatatcaattattccctaaggtattatatagttgtagatcataaacttatagcttaaattaaacatcacagctggttgctttaatttgatgcattatgccacaaatgtttcaacagcttgactaagatgagccatactgccgattcaaaagaagagcgaaggtcaatgcacaggaagcctagtcatttgcagattttctttgagaatattaaaaagcattctgcagaatatagttaaatggaatataaccaaacaaaattaaagaaaacagagcagactattgcgatggtgtttcacttataaaaagcagcctataaattcttaatttcatgtcagtgtttacgatagcacattttaaaaatcatgaatagggtgctttgagaatgttgtttacttctttcattgtggtagccttgcctgcttcttttcaaacttaaaacttcattaaatctgcaaaggaaggcaattatgagaagaaagataaaaaatgattgccccctttttcccctctctccaggaaagtttttccccctcaattagaagaccagaaaagctgtcttttcactcatcccattcttcactccaaaagtctttagctaagaatactgataataattccaccaagattatcattcattataatgaaaacccaatttttattctaactccaagggtattctaacccataataattagccctaaatattatttttgaagcaattcacaagctaaaataatctgttagttaagatcagaaaataaaactccctcaaatcatgtgtgctggcaacacaacagagatggaagcaatyatgtgtgaaaggttaataacatgatattttaagattaaaaagatgaaactaagcttttccgtatttgtcataaagacataaaatttcaaaaacaaaatgagaacccaaatatctctgagagtttgctctcacaacatctaactaatcatcatctcttagttcagaaacacttagttgttcataaaccacaaatcccttagtatgacatttggagccccattcaatcccattcatatatcattaaaccatacttaattacacactctagccattgcctgtgtgtgtgagtttttctttagccactattttaaacactcttcctcctttcaatacagttcaattattgtctcctattaacgtaatgctaatactttcaatcaaaattaacccttcctttattgatgtatctataaaacgtaattattatgggatttcagttatggaatwctttttgtctcagagttattttaacaggcaaaatataaatttctttgtttcatgtatgactcatcttttctttagctcttcattcttctgtgtaggtaattaatgtctgttgagttaaattacatcatcattctaatccaacactttttttctttatagtgagggaaactaagtttcagagagtttaagtatgttttctgaacaagagaaactagtattgtttccaggatcaaagacttatttcttgctcaccatacataagtgccttataaggtgcaggtaaaaagcttgatctgcttaaagttactgatatagtcagagtttggagctactgcaagtttctaggtgctcagttcagccttaactggagcagaaaacatgccctgacctccttatcttgttttttcttaactctcttgtgtaccagtatttttggagtcgatttgaataacaatagtaatctgctttacctcactttacctatacatggaaaaagtataatcctggaggaaagtataatcaattgaaaagaatatggcatttacagtagagaaagctgaatatggaacctggctgtagtattggttgtcttccctaactttacattcagtattcctatttgccagtcgagggaacaatacttacctcaaaaaagttattgaaaggaataaattgagttcatttttaaatgttgactaagaaagactctgacacagataatttgctgaataaaaacaaatctattttcccccactctgctgctaaatatacccagatgcatttgattgaagatatattaaggaatggagaatagaaggaaaaaaaaagaaaaaaaaaaacagaagtaaacgggagaaaacaaacccactaagatttggagatcttgcatgataccactacatcagtggcactaaacccaataagatttggttctaagctttgctcaatttagtctctttcaagtagtctttctttagctattttagtcccttagtcacattagtccctttagttttagtggaaaaaaacatcagttactatccaaattatacattctaatgggaggaactttggcatgtccagcaagcttccattttctcagatgtaatgtgtgcattatcatgggaaataagccaaggcagttgctggctttttgtgttcccttccattctcccttttgctatcatcctagaaaatcacagtgatccattgtgaaactgaaactaagtctcacttttatggactatttatccttaatgaccttctcttttattcagccacagctgtatgttccaaaagtctaggtgttaccataacatagaccatgctatctagctatcttacacaccaaaatcctactccataaccatgagcccctgtccttgtaattcttctaaagccatccgcaatgccttgaagtccctgtcctttcagattctctcagtctatgtcttattttggccttttaaaatttcctgctaagtcttattattttcatctatattcttaattcatttgtacctctatttgggtacagagtgcaagcacattcagaaaatctcacttttagattaataggtcttttcacttcccctgttctactcttggggtgttgagaaatgctaaatgaataatatatctgggaagataggcttgtctaaagtgcatggtctaaaatatcaaaatgagagctccatgttgctatatgttctcatacccctaccctgaaaatctttacactatagttactttgatctcagctctgtgtccctgcacaaattaaaaactcgcttaagatattaatctttcctcaatggagatgcaaatgtactctagaagtggatgttctgtgtctgaatctcaactatgccactgactagttttgtgaccttagatcaaatatttatgtctgtacctctgatttcctatgtgataattagaaaagtacataatagttttgtgagaattaagtgacttaataattgtgaaacatttagaatagctctggtcatatagtaattaccaaacagctatccactattattggcatttttttgaacagaaatgtccatttcatttccttcttaacataaccaaaaatgatgctttaagaaaagtactcttccaaatatcctcaatggcattacctccagaggttttgctccctgtctagcaattttcttgtttgagcattcagtgtgtttgaacagttgtcccatcacataacttcactgcctttatttttgtctgactgtcttatttcagttaaccagtctttaagttctgagattcttttatcagcttggtttattctgctgttaatacttgtgattgcattgtgaaattcttgttttgcgttattcagctctgtcagacctattaggttcctttttatactggctattttgtccttcaccccctgtattgccttattgtgattcttattttccttagattgggttttgccttcctgttgaaacttgatgatctttgttcctagccaaattccaaattctattcctgtcattgcagccagcttggcctggttaagttgtgcacatataccctagaacttgaagtataataataataataaaagaggaagaagaagaagaagaagaagaagaagaggaagaggaagaggaagaggaagaagaagaagaagaaagaagaagaagaggaagaagaagaggaggaggaggaggaggaagaagaggaggaggaggaggaggaaagaagaaagaagaaagaggaagaagaagaggaaagaagaagaagaaagaagaagaagaggaagaagaagaggaagaaagaagaaagaagaactcttattggagaactggtgcagttgtttggaggacatataccactctagacatttgagttattggagttcttgcatgggttctttctcatctctgtgtatgggtgttcctttaactgcaatatagattgagtcaatagatacagtatagatgcagtatagatacagtcaatagacttattttctggatgttttcaccaggccgaggctttgtgcaaggtttttatttgaagctgattttttgtctctggttttggaagaaagtatgctagcaaagtattttttgtgttgaagctttggggtgtgatccagtaggtggcacttaggcatactggtcagctggtagactcttgtccagctatgtggctcccctgtttcctctcagttgtaactgttttctttctcaatgctctctgaaagtgtgggttcctctcccattgagtgctggctgtagaaggtggcttggcactcctgggctgcccactgtatctctccggtgatctcagtccttatgtttcttccccaacctggaaacaccagaggaaggaaccttagtagtagttatggctaagggacttttgcttgtctcctgggggctccacaccagagatacgggtcagtaatcactcagtgcagtcagcccaggatggaggggctatgctgtgggtccaagccasaggttccctgtctggtgatgagcagttggaggtgtgtgggacccatgggagactaactacctcctctctttgggtcaactgcagcttattggaggtgtaggtaaagcacttggggtctttgctacttcattactccaagggaagcaagagcagttccactgcagaggcagtggcagagaggctttcagttgcccttggaggctctgtccagggagttgccaagtttctactcactcagctctggcaagaggtggctggaagcccagtcccagaggaactgtctggtgaggaaatgtgggcaccaatgtacatctggccacttttctgtagggctgctgaggtatgctgggggcccacttcagtctctagtcacctcagattttcctgtacctggaggtatcaccattgaaggcacttcgctgggctggggaggttactttgtctctgtgtcatgcctgcgtgggccgtcatcctgcctggcttttctccattctccatgggttgagttgtttcctctattagtcccaatgcaagtacttagatgtttcagttgaaggtgctgaatttacctgccccttttgcccctctccgagagagccacgcacactagctgcttctagtcgaccatcttggccacctccctaaaaattaaaaaaaaaaaaaatgcttaagtgtttttagtaaacataagtatgatttcttatatgagtttttaaaaatttttaaaaagaaaaagaaaacatcatgtttcttaaaaacctaaagtttatactttcactatacaattttacactcttaaatatcaacctcaaactcgtttccacaatgccatctttctcatcttaaaatactttgaaagtataaacatacacacacatgcaggagaggagagaggcagagactgagacagacagacagacagagagagagagaggggggaaagagattttaaaagtgaactagaaaacagtaattcacatttagtttggggaatagaaagaaaactcccaaacagattactttgagataactccaagaccttttggtccttatgattatcctcaatttaaagaaaaacayatgtacacacactgccagatgtggtggcttgcacctgtaatcccagcactttaggaggccaaggcgggtggactgtctgagctcaggagtttgagaccagcctgggcaatgtggtgaaaccccatctctaccaaaaatgcaacaacaacaacaaaaaattggccaggcttggtggcacacgcctgtggtcctggctactgaggaggccgaggtgggaggattgcttgagcctgggaggcagaggtttcagtgagccaagatcatattactgcactccaagctgggtgacagagtaagaccatgtctcaaaaagaaaaagaaaaacatacacaaaaaacacctatagatgaatcccacttcatctccctactcttcccctgtctattccactctcaaaattcaactcactgcagctgaactgcaggagaagcagcaatgcgaatatgttttatgatgatacctttgcaatataaagttttcaaattctagacagttgctcttggcctgaagaaataactactacattaaacccttggaatctagtaatttcaaagaatagaaaattagaaatttcatcaattgtgttataataaagttggatattttcaatatttaatgcttttcttcaaaatatgaagacaacatttgttatataatatcagctagtcacgttatcctctttcacagtcctttatttttcttccaacatcaaagcaaaatgtgaatgaaaatacatcacatatatacctagtcataataaggagctaaagtcattgacacaaatttacgaagggacatgaatggatacatctgcctgtgtaaactagctcacaaatgaatacacacatatgcacagcattgagaaaccctaaacaaagcacaaaattgtgaatacaaagattggtttgcaagcagaacatagagagccaagacacacttagtatttactaagtattttatactgggcatttttttctgaaacttttatatttttcatttatatgctgtgaatataatgcctgaactgtctatatcataaggctgctgtgaggctcaaatgagttaatacgtgtgaaaatgcttttaaaacttgaaaataaattggaaaggttcttaactaattatagttaaaagagccaatacttttataactgagctctatctaatcattaaagaataatgagtagctcttattttgctcatttacttttatattgtagaaaacactgaatagctttttctaattcattctatgatttgaatctaactttaacactgaaaaaaaacaaagccaggcttcccccctcaaatatacgcaacttcacttaggaataggttacataatttctcggtcaaatatttgtaaattaaatctagtgatgaattaaaaagtatcacagaaatagtaggcagtatttatcaagcgcttcatgtttagaacaatatttatgttcatgtttagagcaatatttatcaagtactttatgtttagaacattttatgtttagaacaattctatacagtagtttctaatattatcccagttagactgatgagaaaagctaggtctagagaggtaagtaacctttctatcaacamacatgtagtaagtggtaaagctacaatttaaacccctccagtatgactcctgaactcatagtcatagcaccatattatgctgtttcactgaattttagtcaataataaagtttgaataaacctgtcactataattcatggcaatagtaaactaaagataacaactacaggttgtttccatagacctagtagagatgatgttatcatcaatgacaaaccattaactttatatgaaatggcccacaaaactttgttttattttcaaaatatgcatatttactaaaaatggtacatttaaattcagttaaattttcactaatatttatattgacactacagtgtgccaggaatagtgtgtttgggacacataaagaatgacaatatggagtaaaaaagaaattctgtccactctcaaagcaagagatccctaaaggatgaaaaagacaagtgaagaaagtctgagattttttttttaggtcgaatgaatggcaagtgtacatagtcctaaaatagccagatatacatcaagaactaaaaataattcagtgttaatcgagagaattataaagtggagagtggcagagatgtagcttaggaaaaggcaggtgccagttagcagagagccttctgtcattctgtcaccgtgaggtgctttggcttcatgctgtggaagctatttgaagccacttcctctttcagatggaatatatctgaaggctatagggtgaaattaaacataacaaaattgaaataatacagaaagttggcaaggaccttataaggacaattggagagaaagaaagaaggagaaagggaaatgcatttagaaattgttgaagagctaaaatcatcagagattggtgactaattagagagggatgcaaggtgacctctaatataaggtaactgagtgacatgtgaagccatttctgatattcataaattaggaagaagagtcagtgaggggtagaggaggctgactgatgagttaatcatgttcaattttaagtatctaagagacctctggatagctatatccaaatgcagataggcacagatgactagctctcaatggagaggtcactacaatgaatttgggacttgtagacccacaagtgatactgaaatcatgccaagatgaacaaaaaagattttgcatgcataatatttggcatatagtacattctacaaaagtatttattttaaaattaaataaagcaagttgtaatgaattaagaaaaatgtgtaaaagtagccccatttaggggcaacaggaagcacccatggagaagggatacatgtatatacacacacgcacatacacatgttgatatcaatatatataatcaatttatatacatattgtctgtggtcatatacatatgaagtaaaattattaaaatctccaggaaagtaagcatcaaattatctattaattctagctagagaaagtggtaaattggatagctctatacagaagacttgaaaaatgtctctttttatttctgttttataaaaaaattctgaaggagcagaaaaaaatgttaaaatttgacaaacctgcttagtgagtccatatctattttaaaatgtgtttctataagcttgaaatattttctgataattttattaaagagtacctaccaaatgtggaacagacttagtgtaaactacaatttgtaaaatttggctggaaggtgaaaaacaaacaaatgaggattccagaagaggagtgatttttccttttaaaagataggaaagatttcagcattttatagattgaagcaatgggcagataaagaaggatgatttttgaaatataggcaatagaagattgcacaacaatactgttgtgaaataaaaaatgagaacatttgtatgatctttgtcctttaaattcaattacaatagagttagaacttttatattttaatatatgacttctactaaaagcataaactcattttgtctcattctgcattataataaagaactaaaggtaaaatgttgtacctcttaggtgacatcattgaaaaacttatagtaagacaaagtcacataattttttttctcagaggaaatcaataaccatgagactccttcacaaactgcagtgcatttatatatttcaaagcatcatcacacagttgcagtattctcagtaatacattaccaacaccaaaacaagccagaaagagcatacctgctgaaagaaaaaggaaggaaaatgtgttacccaacatgtatgattttgtatttctgaatattgaagactgttgaaaagatgatataattgaatttattgaaatgtacaagatggcaatagagaatttacaatttatgatacagaatttctgacctgccctatatagtaacaactattgtgattctgtgagttagaaattcttttaaaattttgggcaatttatttggaagtacctttttaattttgtgagctcaagagggatgtttctcctttttggcccttagagaatagagaatattcttctgagatatatttttagccataaggtcattatttggtgtgctggaacgatgatggagttgaggaaaagatgacaatgataggagatggcatttgtgaaaaaatatgatcagtgctaaaagaaggcattacaaccacctcttgagtgacagaaagtctcttaatgaaatgctgaatttatcagatacataaatcaaatcatcaactgttacagcaaatctgccaaattaggaagaattcagctaccatcattactaatcccattactacaaattccttgtttcttactcttttcattccaaatgttctcttcctgatccttttgctcattttttttctcaatcctgtcactgacacttctgcatcttggtgtcagttcattgtctgaggtaagtcagtcaccttgcagtccctcacctcctgcccccaagagctgttcctcattggtgttctccagtgacctccactccctgaggtctcatatcagggcaagtcttcctagtcagatgatcaaagtctcaaaggtgttggctgctggtacaacaggattgggattcatattctgaggttaggcatgcctctcaccttttaagtaacttagttgaagctctccttgagaaaattatgaactagacaaaaataactcatggtacctcccaatttgcagaggtaggctcctttaaccctcctaccatcttttctggccctcagcctctttttaattccatctttcaggcatcaggttctgattcagcttcagtcttttcttatcatggaaaaaaaatcatcttcttgttcttaaacacaataattatcagcctaagtgagctacctcccccagaaatgcctgtcactgtttcagtgaattttaaacaccattgggggagaaaatttctctttggcagatgttaagatatttctgaaataatacagttgtatatgttaacttgtaagaagatctttatctctaaattgtaaactctaagataggtaataatcactgttagtaaaaattgtaataaaaatacatacagaatatttataatgtactagattttcttatttaatcctcagaacagtactatttgtgattatcctcgttttactgatcagaaagttgaaacgcaaagaggtttgtaaacttgcctgaggttgcctgacaaagaaagaactacagagacctcagtcttatgaagctaccattataaagaatatttcttaaaaaattctgtgtctactgaattgaaaaaagaaaatcagttctgtactgaactcattgtaatcctcatggggtcagaaatgtctaagcattctccagccaaattatttctcctgtttttcagtatccaacaagtattacacacattgaaactacttagaagaagaccaatagacctaccaaatgaaaacattttaatgaggagatttaaaagggaaggagatttatacacacacagatataaaccttccttaatgatgaagtatataaaacctaccctcagcttctttttaattccattttttaggcatcaggtttctggttatgtgatacagaatacaataaagacaatcttaggtagaattaagattttccagattcaggccaccaagaagaattatactggctgaggatactaccagtagggaataaagattccataaataacaaaactcaccttttctatttttgagaagagtgtggggagagagagagaaagatgctgtatcttttttatttacccctgcttgactttcaacagaccctggttccttgcctaccttctcaccatgtgcaagaagttgtgcaaaatgattccagtgcatttttgttactgggtaaattgaaggttaacttcttgggcaatttgttacagaaatcagacaagcttcaaatctattcttgcaccatttctctctattctaaatgaaattataaattcatatattcgggaacctcagaaattccaatttccagaatatctagaagagatgttaaatctaatttttaaaaaaccacactggccaggcacgttggctcacgcctgtaatcccagcactttgggaggccaaggcaggcagatcacgaggtcaagagctcaagagcatcctggccaacatggtgtaaccctgtctttacaaaaaatacaagaattagttaggcgtggtggtrcgcacctgtagtctctgctacctgggaggctgaggcaggagaattgcttgaatccgggaggcagaggttgcagtgagctgagatcgcgccactgcactccagcctggcgacagagcaagactccatctcaaaaaaacaaaacaaaacaacaacaacaaaaacacaataattagaaatcaacaatgacagagagatcaacacatctggaatttagttatgagaaaagcaaaaatgtagtgggtgcaacggagaaaaagttgtaaaaagcccatgtaaaaataaaatgacaaaataagttataattaaattgaggtaatatagttacagactttggaagaattcagaatacataattatactgatgatagtaaatacacaactacatttttatgtattttctttattatcttgaaaataacttaatgctactgtgcattaaatacttcttcattacagttgaattcaaaaaaatcagctctaatgccagtgagaaacagcacatggggatatataaaaagtagattaaagaggaaaacacttttatattcctaatttatcacactattttattactgatttattctactctttatgctttaatatcgagtacccttccttgatttaaatatactttgaaagggcaagagtagaaagagtagtgaacaagaaggcaataaaacaaattcagagaaacaatcctttctattttctgaaaatataatggagacttagccctgacttacagttttgtttttatatataacaatttgataacctctgttgcttgccacaaaaaaaatctctggtaacaatttaaaatgaataaaataaaacaataccagtattttaactaattaaatgggaaaataatcacctgtaactttgaggaaatgcgttaacatttctgcatgtcttttcattcaaaatcaagttaagtcctttgaaagtgggcctagagatacaagtgaaaaaaaattgttttgagatgtaagtaacataaagagcgagaaacagaacagatgttttcaattttctatccagtacagggtcacttgatgttactatagcattagtaaagctttttaactctatattgagcaattgtttagtcctccttttcagggtcagtagatagctatcaaaatttgtattttcattttcatttgactagaaatttcatggatgaaatatcagaaatatttctaaaagtcaaattgcatttagtgtcacatagcaatgtcatagtttgtcagatagtccaattttactgttaaaaataatacgtgatcaatattctacaaaggtaaaagaacggaagaaatcaagatatacaaaaaagttgtatcaacatcacttgagaaaaactgtcaactgcgtgaaagaatcagtatattgttatgaataagaattccatttacaaatgatttcaattcatacactgaattccacagacatttcctgctattattttacttttactctcaaaatacagagaatctcggaacctgccaagttatagaattaaaaagccttaattatctactgggtgtaagaaatttatgtaatggtaacaacacataatgatgatgaattctgcttctcttaytgactcactctctcctacccctccttctccccacgcaagttaagtaatattagacaaacctgactattgtttcttcacagcagttagtccttactcagatgattaatttctgtgaatctagaactgttttcaatactttgggaaatactatacacaaaaacaggaatggagaaggataagcccattagggaaactgctagagcaaattttttttaatgaataaatgttgcagtattattgacagtaaccaagatgcagaaacagcttaaatatccatcaacagataactggacaaaggaactgtggtatatacataaaatggaatattattcagccttaagaaaggagatgtgccgttttacatagcatggatgatccttgatgacattatgctagcagtgtcatacattctaacaagatatatgtgtatatatttgcacamatataatcttttaatgttttctttaaaaactcagttcctcaaaatcagctcttctttatttgaaatagtagctgacagtatgggtagcacaataaagtatgaaaagtagataggctcaaaaaatacttgaaaatagcttaaacttattagtgatgcctaaaagtaaatattgcaggcataaagagcatattttcttttatgctcaatagaaaactctgttgaatcacaatttcttttgttgaatagcaaaaatctttctagattttaaaaaaagtcaaaattgcctccgtgtactctaggaaaaattatggtgtttaataatgcacaaaaacagtgattataagaaacaacaaaaattgagttactattgtagacagaatattgtcattgaatgtgacatgacataaagtaggggggacctggattccgatatttggtttgtcgcttcctagatatgtgtctatgaaaaatgtattttatttccctgggcttcagactcctcatctcacactttaaggattagactctaaactcctatccggataaattgtagcagatgctactggtgctgtgttcatatatatccccttacattattttacctttttgtgtgtgggtgtgtgcacatgtgctccaggtgaatgctcactctaagcagccagtaccggactgtctttgtcagtgagctgtccttagctttaggaaactaaggcytacattgcctgcagacactgagagcctgaaaaacatgggcatgcccagctttgctctcttcaccaatgacttggcctggactgggacaattctgaaatgagatttccctttctccagagctttcctgtgggatgaagccaaagccaccctctgagatcttgaagcagtcctttggatgtacttctgttttcctgacttcctcactctactgctgttagttctcctcagagtacttcctaataaatcactttcacaggaattctcatctcagagtcatctgtttctgaggattccaagcaataatattttgatttattttgttttggtttgacattggtttgtgtgaactctaatgtctagcattagataaggcacataacttcagaaaaaattgtaaaaaactactctactataatctgtatgagtaaaacaagtcaatgtaaatatcattttaaataagacccataagagactatagttacattacatagcaaagtaacaataatatcctgatgtagattcttggcatctgtgaactactaacatagattcatgtaaattagataatttccaaataaagttaggaaacttaacaaaaatgtaatctattttgagagtgaaacagaaaaagcaaataataaaaatatataaataatcaaactaaaataaataaaaaaccaagtgaattggtcagtcttatgaatgtattttaaaatgtagaattaatatagtatactaagagtaaggtttattctatatacaaagggatattattaataagtggctaatcaaatatatttatataatgtcaatgtcaagtaaacacaaagattaactcaattttgtgttttcatttaactttaaattaaaacaatgttttaaaaatactatttttatagtactggtaatatatattatatacatatctaatttttaaattatttataaggatttaaaaatgcttgcctgtggaagtacatattattttacaatacaagaaattactttgataaatactaattgtgggtttaatcagatcagctgaatgatataaatttaccttaagactaaaatatttctgagggtgaggactcctttgatatatgccaatgtatcaaaatacttttttcttctggcaagtgaaataagaagaaaaatcagcacaaccackatatctggcatttattttctctcttttaccagctggtttccttgaattcaacctaagagtgcggttttcatttatgtgaaaaaagtgtaaggttaacagtacattcactcctattttgcaaggtatttttcttttgctgatcaataatttcaaatactgctctaaagttttactgtttgacatacatcattttgacagttccttaaagaacttaaatgctacctacaaatgtaatatcaacaagatctatactggagagtagtctacactgctaaaccaacttcattcttgctgtagtggcaaactgaaaaagaaaattctcttccccaccttcttcattttaatccatgtaactcattttattaatgtgcatcatccagcaaagtaaaataaaaatttgttttttatcttgttaaacgtagtgttagattttaaatacatttatctaaagtgtatttaattactggcttcacaaaatctgaagttgagaattgctacacatgggtagagtttttttgataattaagaaaggcttatttttatactgttatatctttactggcagtagacctttaattttacatttctcatcctgcttttattttctagcccctctccttgcattattcctttttaaaactttgactagattaggattacatatacaaagaatatgtaaagtcacataaagctgtaaaccatccaaagaaggattttgcttatttgcctgcttttcagaaattagcattactactccagctttcctttgatttatatttattaggtatatattatcaattattttattttccatatttctgtggaacattatacatacagcacattgttggattttgttctcacgtcttcaatttagtatctttgtcttgtatttgattagcttaatccatcttcatttattttaatttctaatttttttcccatatcctggacttcctaattcaattctagaaaattttcttgtggtgtttaacagttatgtaggccgattttattattgatttcttaacttaaaaaatacatatataatcacttctatttcttaaatgcgtaaatgactttatcttccataatatgaaaggaacacattagtataccacatttatttcgccttgtgttctcttcacctcccattgcattactaatgcctggaatattacttctagtactatgaatttttcttttctttgtttattcatttaytgtagtatatcacatttatataaaatgattagattgctgtattaatactgtgattacagagggcatttattttgttcagttagttgtatatcttttggactaaacttctgagtactactattctcaggcacctrcttcgtttggcctgtgagctcatattatctgtgcaatattggctttttggtgttggagaaagaccaaaggccagaccatagtcactgtcagtctagagtagtccaaggtgtatatatgtgggagttagggcataggacatgggctttctaacagaaagtcccacacaccaccaaccagagttattacttgattttacaatgaccaagcaagaaacgactctactcagaatttcactcctaaatcctttgggaagagaatgtaaggaaaggacagttttacaaagctgtaatctgtaaagcttggaaactggatttcagaagtaaaggactgaatgtctctggcatgtcagcccccacatactttcacctcacccagaaaaacccctgccaatataaatattcacaactgtagtttgaggaaaagaagataggcattgattgtccaaaaacaaggagatgggagggtgggatggcaagaggtaaaggagaatttaaactgtccttccgatgctgtctctggcttctctttgccctaagctgtggccacccattcactcttcacacagaaacatttaaaatagacttatttctgttattcttcttgttagatcttggattctgtctttctctccttattttgttctcagcattacttttacaaatattaaccagcaatccatgcaagttggacatcttgttgaacacctgaattcttgtgtgtgtgtgtgtgtgtgcktgtgtgtgtgtgtgtggggggtgaatttttatctctattcaatatgtgttatttatataaataatttctatttagcagtctataatttttcctgaaactcatttcccgtgttaaattattcacatattttcattttatgttattttattgttttacatacactgactttatagctagataatattgttgtagagttgaaaatctatgtttaacttacaataaaaaaagttatccatgtaaaatgaaaatagatgttctgaaatagggccttataaatattcctttgaaaggacacttcatgaagtgtgaaaatgccaagcatcagctaataaatctttgtgacaatttctgtttaaatgcaatttttaaataatgcaccaatttaaaacgtagaataaataacatagtgagaccagaaatcttatccaaaattgtattctgttatgaatacaattgaatactgctagatattacttactttatagcttaagaaatctccatgcattattttaatggctcaaaccaccctatcacatttttttaaactaaaacaatacagcagtcaaaggaaatagttgatctatgtttgatactatgcacatacttatttacatgaaagcatcaacatgagcgcatggccctgtgttgaaaatgccgaggcaacaaatactgtaagacaactaatacttgtttaaatttcagttctttttgttgattctttttactccccaaaacaacttgtttgttccgggaaacattgactatatagtctattagctgcatctctccctatcctctctctactctgcctccccttttttgtcttcttctcaacttgcttctcctgttcatttttgccttattctttcaccatttctttcctcctccttcctcacattttctcctcttttcccttctcttcttcctccattatcaagtagtaatggtaccatttctcatacttacaagtgccaatgatggttctactcatcattcaccagacactttccatgtgctggacactgtgcttagctttttactatatgagtgattacagttggcagtgctcggaattcaatgggaagttcaatttaattggcatgtggtttgattaaaattatgctctgacagttttaaaattagattaaaatagactaattratttagattaatcaagataaattttaaaactctaaaattrtgtgtatacacttttaataaaatatatagcttcttaatgtatactttgtccctaggttgatttaaacatggagcaaaatataatgcttcaggtgtaaatatttaagacagttcaaaatgaaataacactaaaatgaaattaaattgctcataaatttattatataagattgttattctttaaaatatcctggctgtattctttcttttgcattaggacaccagccaaaaaccatatggcacataacatcagtaaatgttatcatataacaataatatttaagggtgcctgaaaatggtcctcttggagaaaattagttaataatataagcagatgcaaaattgcctctaggtaggcatatatttttatcagcaaaatatttgatgattggcttccaaggataaattcactataattaacttctgtattaaaattgtttacaagagattggtaacattagacaactcaaactgggttgttctctgtaagaataaatggaagtcacaagatttgccttaagcacctctttcaaaaagaataaaaatacagaaaaccatttgtactgtaattgcaggaatcaaactagttttactttatagattcacaatgaagtaaaatgtataaaatcatttacattttaaataccaaggatcagggtccctagcccagttgaagaaggtagagtaaacatagttgaggctttgggtgaagtataataaaaaataaacctatgttagagagcttatcagaatctttgaacagaaagttgtatatattatatatatatttctcccctggggcttacagtgtcctggagagtagtatatcatacaaatagccagtgaccagaccatgaagaaccaaatgaataatgctaaagtatttcaaacatatgttgaatttataagggaccaatgaaacatgatctgattttattttagaaaggtgagtttagctgcagtatggagcatatattaagtgatacaaaactggaagagagaacactgttaaatggttactgcagtgattccggaggaaaaaatatgaagggctatactaaacactggtagataaaacagagaggaaggaacagctctaaaagttatttaggaaaaagaattatttgaacttataaccagaaaaatgtgagaagctaagtatccaggatgactcctagggtctataaygggagattctttgatagcagtgcctttcactggtacaaggaatctgcacgaagaaaaaattagaagatgacgaagtttgtttattctatgctgatattatgacatatctaagtgggtatgcctagtaggcaaactgacatatgggatgggcattgttaaaaagaagttgtatagattttagtaataaaatgagtgtaaggagagaggtgatctttcataattttggttcaccaagtttcagctttctactattattcatagttctaattcaagtcaattattcttaagtgactggcatcacgaatattttggtaatattctgaaaataattatttaaaattaatggtcgtgaagggaaattggtataatagacaaatcagataaggtaaagttagtgtacatacagctggtaatattcattttcccttgctagtaagccagtatgaacctgaaataacatagtatgtttactaatctagccaatatttttaaatataaatccaatactgggagcactggtgaaaaactggtacacacattttatttctagtgacatttttgcttgttaacaatattttgggacacaatttaacaaatatttagaatgagccatgaagatattcttaaaatactatttgattaattctattcttacaatttaacttaaggaataactgaaagtaaaaatagagatatgcaaaaaatgtttaatgtggttcaaaaattagtctaaatatcttcaagatttatcaaataacataacaacagcaaaatgcaatggtacataaccattacagattcacatgtaaagaaaggagagtgaaattaaaagaatttctatgagacattgaatcttacaaatttttccttttttctctgaaaattgtatttcaattgaattttgttttatatttggggaccaattacacttttttttactctaaataatatatacatataaaatcataacatttttatttattatggattcctgggttcttttgcaggtttgttacatgggtatattgtgtaatgctagtgtttgggtttcaagggaacccatcacccaaatagtgaagagagtatccaataggtggtttatcaaccctcaactccctctcataacctcccctcttttgaagtccccaatgtctattatttccatctttatatccatgtgtaccccttatttccaattcccacttataagtgagaacatatggtgtttgattttctgtttctgagttacttcacttaggataatggcctccagctctatccatgttgctgtgaagaacataatttcattcttctatatggctctgtagaattccatggtttatagacaccacattttcttacccaattcttgtttgataaacactaaggttggtttcatgactttactattgtgaatagtgctgcagtaaacataagagtgcaagtgtctttttgatgaaaagatcttcctttgagtaaatacccagtagtggggttgaaaggtagttctatttttagttctttgagaaatcttctaccattttccgtaggagttgaactaatttacattgtccatgaacagtatataagtattcccttttmtccatatgtataccaacatttgttatttttcaactttttaataaaagccattctgactggtttgagatggtatctcatttgcatttctctgatgattagtgatgttgaaggttttttcatatgtttgttggcaacttgtatgttttctttagagaagtgtctgatgacctttgcccactttttgatggagttatttattttttcttgttgattgtttaaggtccttataaattttgaatcttagtcctttatcagaatcatagtatgcaaatattttctcccattctgtaggatgtatgtttactctgtttatagtttcttttgctgtgcatagctctttagtttaagtaagtcccatttgtctacttttctttttgttccatttgcttttgagttctttatcataaattatttacttaggtgaatacacagaagagtttttcctagattttcttctaggattcttatagtttgaggccttacttttaaatctttaatccatcttttttttttttttttttttttttttttttgagacagagtcttgctcttgtcgcccaggctggagtgtaatagcacgatctcagctcactgcaaactctaagtttccaagcaactctcctgcctcagcctcctgagtagctgggattgcaggtgcctgacaccatgcctggctaatttttttttttttttgtatttttagtagagacggggtttcactatgttggccaggttggtcttgaactcttgacctcaggtgattcccccgccttggcctcccaaagtggtggaattacaggtgtgagccaccatccctggccttaaatctttaatctgtcttgagttaatttttgtagtatgttgagaagtaagggtccagtttaattcttctgtatatagctagctagttctctcagcaccatttattgaataaggagtactttccccattgtttatttttgtatacttggttgaagattagttcattgtagatgtgtggcttttttctgggttctctattctgttccactgctctatgtgtctgtttatgtattggtaccatactgtctyggttattagagccttttgtatggtttgaagttggataatgtactgtctctggttttgtttttaatgcttatgattgctttgggtatttaggcattttttggttccatgttatttttagcattgatttttctaattctgtataaaatgacattggtcatttgataggaatttatttgaatctgtagatttttttgggatgtgtagtcattttaacaacattggtttgttctatctatgagcatatcatgtttctctatttgtttgtgtcattgatgatttctttcaccagtgtattgtagttcttgttgtagagatgcttcaccttcttggttaaatgaaatatatttttaggtattttattttattttttgtggcaattgtaaatggaagtgaattctttatttggttgtcagcttgaatattgttgatgtatagaaatacaattgattttgggtacattaatttatgtcctgcaactttatttaattcattgatcaggtctaggcattttttggaggaatctttagggctttctatgtataaaatcatttaatcacaaagagagatagtttgacttcctctcttttatttacatgccttttctttgttttgcttgcctgattgctctggcaaggacttccagtattatgctgtataagagtggtgagagtggatattcttgtcttgttctaggtcttaraaagaattctttcaacttttaccattcagtatcatgttggttgtgggtttgtgatatatggatcttattattttgagatatgtttatttgatgcctagattgttgagrgtttttatcatgaaaggatgttggattttatgtaaaactttttctgcctctactgagataatgatagggttttttaaaaattttgtttatgtgataaatcacgatgattgatttgcatatgttgaaccattgtttcatcctagtaacaaaattcacttgattgttatggattatcttttgatgtgctgtttgatttggtttgctagcattgtactgaggatttttgcatctgtgttcatcagggatgttgacttatagttttctttttctgttgtgtccttgccaggttttcgtatcaaggtgatactcgtttcctagaatgaattaggaagcattcccccctccttgtttgtttttaataatttcagtaagattggtaccagatcttctttgcagatcttctttgcctatctgatagaattctgctgtgaaaccctctggtcccagagtttttttttttttttttgtagatatttttattactgattcaattttggaactcattattggtaggctcagagtttcagtttcttcctggttcaatttttagaggtggtgcagttccaggaatttatccattacctttgggttttctagattgtctgcgtagagatgttcttagcagtctctgagaacgtattgtatttctgtggtatcagttgtaatgtcacttttgtcatttctgatgatgcttactgaaatctatttttcttggttaatgtagctagtggtctatcaattttgtttatccttttaaagaatcaacattttatttcgtttgaaatttagtaatataaactttcctcttaacactgctttttctgtgtcacagaagtgtttgtatgttgtgtctctattttcatttgtttcaactttttaaatttctgctttagttatttgcgcaaaagtcattcaggagcaagttgggtttttattttgtttgttgtttttttcattttcttgtgtagttctagtattgatttctaattttattgcactgtggtctgagaagttgcttgatatgactttgatttctttgaatgtgttgagaatctctttatgatcaagaatgtggtcaattttagagaatgttccatgagcagataagaaaaatgtatattctgcaatttttgggttgagtgttctgtagatttttttaggtcatttggtcaagtctaatttaagttcagagtttctttgttagttttctgcttggattattggtttagtgctgttggtggggtgttgcagttccccactactattggatgactgtctatctcttggtctagtagtatttgttctataaatctgtgtgctttgatgttacatgtgtgtatatttaggatagttaaatcttcttaaattgaatcatttagcatcacataatgctctaatttgacttttttttaaaaaactgttgtttatttaaagcctgttttatctgatactaaaatagcaacccctgctctttcttgtttttcatttgcatgatacatctttctttatcttttkactttgagcctagggctgtcattttgcatgagatatgtctcttgaacgcagtagatggttgggtctctctttttttttaatccrattttccatttttgtcttttaagtggagtatttaggctgtttaccttcaaggttaatattgatatgtgaggttttgttcccatcatagtattgttagctagttgctttgtagtctcaattgtataattgctttacaggatctgtgaattttgtacttatgggtgcttttatggtagcaagtattgtcctttcatttccatgtttagaattcctttgaacatttattatagggccattctagaaatctcttarcatttgtttgtctatgaaagacwtcgttattcatttgattatgaagcttcattttgaaggatataaattcttggctggcatgtttttttctttaagagggtaaaaataggcccccaatctcttctagctgataaggtttttgttgagaagtcagctgttagtctaatgggattttctttatgggtaacttgtcccttttctcaagctgcccttaagatttttttctcycccttcatgttgaccttggataatctcatgactatgtgctttggtgatggtcatcttgtgtagtatcttacaggtggtctctgattttctttcttgtatttggatgtcaacctctctagaaaggttagggaaattttcctaaattatttcttccagtgttttccaggttgtctttttcttcttcctcatgaatgccaatatgtcataggtttggttgtttttcataatccgatatttcttaaagactttcttcattttttaaagttcttttggctttatttttgtctgagttaattcaaaaactggcttccaatatctaaaattctttcttctgcttgatctaggctattgttaaagctttcaattgtattttgaaattcctttcatgaatttttcaatactataagttctattttttttattttgttttgttttgttttagtatagttatgtcatgttttatatcttgcattttttttctggtttctttgtgctgaattttaactttctcttggatcacactgaatttcctggaaatacatattttgaattattcatatgtcattttagatttttaattttggttaggatccattgctagatagctagtatgatcctttggaagatatcaagatactctggctttttgtactgctcaagttgtgctgattccttctcatctaagggagatgtacctttttatttttgtttttgctatcatttggatggaagatttttttttgtattcctttctcccttgaatgcttgaatgtgtgattgtgttgtatgttttctatgatattttggctttatttctgggtgctttgaggggcccagtgctctgtttgggttccttatttggggctagcttctggctttttcagatgctgcttgttgtagtgatgtgttagacatatgcctcctgcaaggcttagggtgaggaggaaggactcaggaagcttattttatggactagcagtgagcccttctggcagcaggtttttaatttggttgtacagttcaggatccagtccrgtagatggtgattaagagtaacatctgtcttgccctcaagtaggttgatgatgagtggaagcacctgccctgaccaagtgggatatggcaggcagagatcctgttgggtgtattgagatctcaggggaggggacaaggggatggtgcactagctccttgtcctaagcaggcagggacatgatccacttccctatcatgcccctctcacagggcacatgttcatttatatagactttaaccttttgttcctgaatgcagcacagctgcagctggcaggtacaccctttggctgctaccaccgcacattgaccattctctaaaattgactacattcttgatcataaacagtgtctcaataaattcaaagaaatcaaaatcatattgatatggtttggctgtgtccctctccaaatctcaacttgaattgtatctcccagaattcccatgtgttgttggagggacccaggaggaggtcatcaaaacatggtgaccagcctttcccatgctattctcgtggtagtgaataagtttcacaagatctgatgggtttatcaggggyttccacttttgcatcttcttcattttctcttgccaccactatgtaaggagtgcctttcacctcctgccatgattctgaggcctcctcagccgtctggatctgtaagtccaattgaacctctttttcttcccagtctcgggtatgtctttatcagcagcatgaaaacagactaatatacatatcaagcaacttctcagaccacagtgcaataaaattagaaatcaataccaaaaccaccaagtaaatggaaagtaaacaccttcctccactcaaggcacatggctactgccagagctttcaggcaccacaatatgattagactgtcatggttcattgattttcagggaacagatctacttcaatacaaaaattagccagatgcattggcaggtgcctgtaatcccagctactcaggagactgaggcaggataatcacttgaacccaggggtggaggtttcagtgagctaagatcacaccactgcactccagcctgggtgacagagtgatactctgtctcaaaaaaaaaaaaaaataggtaagacaggtaaacatagtaaccaacctgaaagtagtaaacatagacatacatgaatttttaccttttatagttaaaattttactattgatttttaaattcctaataatttatttaaatgaaaaattaataattttttttgacaggaaacaaaactgtacatgaagttggcaacttatgattctaacaccatttactgagatctttttatatgtttatttcttttgaattggttttgtttctttgactcttggtcttggttttatcttttccttgactggttctcttttgactgtaattgtcagaaggacaatttgatttatcttaaactaaacggaaatttatcaaaagaccatggggatgactcatcaaacaggactgagagccagtgccaataccaactgtaattaacaacacaattgatactttcactctctgcactcatttgtgctgttctttaattttgtcttctttgcttcctgttttctttctttttctttgtagaagcaaacctctgctatttctctgttctacttgagcataaacttaaccattgtttgctctcaagcttttttacttttgacttaagtaccacaaaaatattaacttattttctttttattccttataccataattgccagaaargtttcctattctagcttggaaagaggatctgttccctaaaaatcaatgaatcatgacagtgtgatcatattataatgcctgaatgctctggcattagccatgtgtcatgagtggaggaaggtaaagttcccgggaaagtatgtatgtgtgacgggagcaataagggggggcctggtcagaaaagtagcatgtttgcaaccatctgaaacaacgaatgcattcatgtaaagatyccttgtgttcttagcccagatactagcagtatttatagctttcatcagctaaaccctgttatatgatgtgtatcactacatacctgcttggatgtttcacagttatctcacttttcattatgctcagtatctcccattcacccttattttcagttcrtcctgcttcttcttcgcccattcatcccatctccaattgaacctgcttctcctgaagtgtttctcatatcaggaatatcaccatcaaccagcctcccatttgctcagaacagaaacttgggagttgttctttactgttcccttttgctaaacctaccaattacaattaattattcacttttaaatctaactcttattttgagtctggaaaatagataggactctatcccttttgcaaaaagcatttcctctagacaattgcattatcctctaaatttcctttctcygatatcatccctacctctaatttcttctgcatacaacagacagaatgatgttggttaaatacaattgaattgtgctagaaacacttctatgatttcccactgatctaaacataaaattgagcattttgtagagcctacaattgtgccaatattctccttgctcactacgttctagtcacaccacacacacacacacacacacacacatatattagtttcttaagaaaaaatgcatatactcctcccccacgcctcttgaactttatccagtttttctttctgaaacaatcccttgcttactgcctggctgtgtccttgtcctataaccttaaatgtcatttcttcactaaggcccaccatgagtgtcaaatagaaatggcatctttatgttattctttctcctaacttccctttatatcacttaccaaaatttgtcgttttttacctggtaaaacatttgcttattggaartctatctctccttcgaagtagaagcagtgaaatagcgagaacaatgaccctttgcttacaactctctatgtcatgagagcattgtgtgctgctctctatacatcccactcctttgctcggggcctgcgcctcttctgctagctgtatagtggagttgtgtcctactcaggagttggactctaaaagggctcactgtgaacatttagccaaaatgtcgcataactagttttgtttataaatataaatatgcaaaataatacaatgtatatttaaatatacaattttattttagttctaattacacagagagaaaaagtgagcacagtttaatttgcataattaaatgtgctattactgatggctgaattaataaattacagatactcattaaatatttgttggaatcaattaagtccagctttaaatgtctttgctaccatttctatttgaaagatgaataaacagacatctaaagcaaytgagtaattcctctagtcacgtgtaatctctttaggttttctgtcttcttatattttgctattcagataatacatatacggatttgactttatttttaatttttgctcatgactatgctgaaggaaacttgaaggataatgaatttcatggcactcagaatttcttgagtttgtcagtgaagtttggtctgtgtatacagtttgtctggtgaagtttgattcatgacatcaattgttttctagctgatcgtcaacctgtaataccatgctgactctgcaagtgtctagtgatcttattcttgtctcccttatgcttgtgtttctggaatgctgtcatcagcatattactgttaatgaatgactgtcttggagacttttgtgtcacttcacggtttactataagaatttttatacacattgaaattaaatcaataccataaaataaaatgctcacaatctcctaaaaaaccgaatattttctttaaaataggaatcttatttttaaaccatagtgattaagtgggcagggtattatatcctgatcttcctcaataaaaatatcaagcaagttaaagctggaaaaatctttatcatatattcaagatctcagtctcaatactgttggcaggtttctgtttytagtgatgcaagggttctggttttttttaatgagaataattttcaaggttgaattaaggacttatggttgttgtattagtcagtgccattttaactctcctaaatcttcgcaatgcctatattcaaaccctattactccaaattcattgtgtgtgtgaatgtatttgtatgtgtgcgtgtgcacatcttgaggcttaaaggggggcaataaattgcaaaatagaaaattcagacaaattgaactataatgcaatgctatcctaacttgtattggaatgcagccatataagcttctagtacattcttctctgaactgaagtgacctactggagttgctgacataaagggaaaattgcagacctttaccacagggcaagagcctataaacttatgcctagacaagttgaaacttcatcctgtagacagatcatgtcaataagaagcagagtatgtttctttatcccaaggtcacctaccagtttatagatgaataaaagtgagagagatgtagagcagaaattccctaatgcaaatatgggccaagggaatggagagcccctgacaaatagaatgtatctgtttacaccaggatgctgctagtgagggaatgtttgggacttgatgtgttgaaaaattcttctggacctatttcctgtagaagatatgtctgtattcatcattttttggatgatgattcaaaaaatcgtcatyctttggatgaatcacctcattaattttcattaattttcatcattaattggatgaatcacctcattaatctttcactcacaatgtaaaattcaggcaatagtgaaaatggagtatataagattctyttttaataaaagaaattctaatctgcrtatgaaagtaaacatttgtcatgtgatgttacagtatcaatttctcagacgtatatttgatttttacccgttgtttaatatcctcacttttctctttgtactgtttttttttcttactttcttttgtcttatcataaagtatctttgcagaccagaattactggaataaacccttagttcagatttcatttccaatctttccctacttaaatttatatatgatacaaatgccagaaattttgctggacttgtcatgtcatcaatattaacttccaatagcaaatgtgtctgcaaatgtcaagttcaaaagctgatctctgatgccactccagccttatgcatattctctcatccacccaattcttcattttttaaaaacaatagagtatctagagtgtgcctaaaagtatataaggaagtgtggagtcaatatggtactaaataaacatggtccctgctctaaggaacttaaatactagtgcagaaggcagaccaaacataggcaaaccacaaataaaagaaataattgtcagtcaaaatgacatttagcaaaaaagatattaagacagagaatcacttggagataagaatctactttaaaaagaatatctgtaaggcagtggcacctaatatgcagaagattccagatgaaggaatagtaggttaaaacttcctcaagtggtgaagatcttgatccattcaagaaactgaaagaaaatgagtgtgaggagagtcatgtttgcaagtgaaagagttgtgttaatatgagatgaaggtgrtaaaatagataaggtgatataaggcaggggctggctgtacatcatggtaaaaagtttaatttttattatataaaccagaatgctgcaataacagtataaaacaagaagcaaatggtagtcatgtgtgtaatttagtatgctaaatatgttatacttaaattaatatatccaaaatcgtatgattttaagatgcaataaatatatagttattcatgaaatattttgtgagtgaaacttttttgtactgattcttttaaaatccattgtgtatttgacacaaacatctcagtttacagcagctgcatttcaggtgctcatttgtcacctgtgcctcatgactactctattggaatggaaaactgttagtgtgttcaagaaggagactgatgtgatccaaattacattttcatgttactctgctattatttacagaaactatgtagtggagaaggtatggatgaagacaggaaaatgagttaggaggctgtattagtttcctgtggcttccgtaacaaagtaccacaaactggctgacttaaaacaattgaaatttattttctcagaagtctttcttgagaccataaatctgaaatcaagatgtgggcagagccatatttcctctgagggctctagaaaaggagtcttcttgacctcttttagcttcaaatggttgctggcaatttttgaagttgcttggcttgtagatggatctacactttctagtttctacctctgtcttcacatgaccctctcttctgtgtgtctgtgtagctgtgtccaaatgtccctcttcttataaagaacacttgtcatatttgatttgtggccaatccttatcaagtataatctctttttaatgtgattatatctgcaaaggccctatttccaagtaaagtcacattcacgggctccaagtagacatgaattttggaggtacacagttccagacagtgcagaggccattggaataaaaggtggtggtggcttgtacacacccagcacacatctatacttcactcccctctgcaccctaggtagtaggctggggtggaggcagtagatataaaaagaagtgattgtgaaatacattttagagatgtaattaactgatgtcttgaatgtggaggggcagagccaaarcaatttggatgatatttccaatcagagtttctatcatgcctttcctgatcagtcactaaatgcccactgtttttatcctggaaatttgtgtttctagcttctaaaggatctaactcaaagccatctcttttatgtccctctttacgaggcctttcttaattagctttaccttattggtaagagtattaaactagaagaaatggattagcctgtcttaagtactaaagaaatcaaatatatatttgtataatccattattagtgaaactttgccagtgtttaaatatactgcaatgtactctttgaaaaaatctagaaactggaaattttagaattgaaatagaaatcataattcaactcacattgtattagttcattttcacactgctataaagaactacctgagactgggtaatttgtaaagaatagaggtttaattgactcacagtaccacaggccctaacaggaagcatgactgggagtcctcaggaaacttatgctcatgatggaaggagaaggggaagtaagcaccttcttcacatggtggcaggaaagmcagagagagagaaagagagagcwaagtgggaagggccatccttttaaacaaccacatctcgtgagaactcactatcaagggaacagcaagggggaaatctgcctccatgatttaatcatctcccaccagggccctcccctgatacaaagagattgtaattcacatgggatttgtgtggggacacagaatcaaaccatattactcattaaaaacaaaaagcaaaacaaaactacatatcctttacatctagaatatgacrcacagttatctgggtacaagtattcctaatgatttcaatctctaaatatactaagttttccaattcatattttttatcagtctgtctcattcataaatgaaatcacccaagttcttaaatctagtcatatttttagtttgtacaatctcttataggtgttcaattccataaatataaagtatactgtttaattttgtaagccctattatttcttgtaaaaatcacctgcaatctgctctcagagtggtcacagtgaaggatgtcaggcagttttctagttcaggtagcataaggctgaataaaaataaatatgttatccagatgttgtattattgatttactgacattccttcatttctgtttgtgtttagagtcttgacccattttttaaacatacaaacctgaaataagtttcctatccctttgtccttttctgcaattttttaaaacctcacattgcttttcctgaggtatggggacccaaaaactgaaagcatctcattaacaggccaactattaacacttgtgggtcccaggccaagaatatgaatgaaggctcacagaatgtaagtctaaatattgaagttataaataaagctttaaaaaccatggaataaaatatgttctaacctcttatcttggaaagtatactttgataattacttaaaaagcacattccaaatccagatttctttggacttcctggcattctctgcaggaacttagcaacgtggagagagccagcctgtgttcttatttaattccaatatccattgttaaatctgggtaatgattgcataagagttctttttataagtctccctttttttcaagttagcaattttctacaacaaaaaaattatattaataaagtttagtgtctccttgatagctcccgaaaattttgtgttccatgagaggaggttttatttgcttggctgtgtttcttgaagattctactgatgtcttcagtgatatgcatgcccccattaaaggtgggtgacaatgatcaatgtgatctgtataatgttgcattttcattcctgagctcatctttggccttggcatcattaagcaatccctatgattctctctstgtctctcttgcttttgttttatttaaataatcttgggggcggttccaagatggccaaataggaacagcttcagtctacagctcccagtgtgagcgatgcagaagatggttaatttctgcatttccaactgaggtaccgggttcatctcactggggattgtcagasagtgggtgcaggacagtgggtgtagcgcaccaagcatgagctgaagcagggcraggcatcgcctcacccaggaagctcaaggggtctgggaattccctttcctacccaagcaaaggggtgacagacggcacctggaaaatcgggtcactcccaacctaatactgcgcttttccgatggtcttagcaaacggcacaccaggagattatattccacgcctggctcagagggtcctacacccatagagcctcgctcattgctagcacagcagtctgagatcaaagtgcaaggcagcagcgaggctgggggaggggcgccygccattgctgaagcttgagtaggtaaacaaagcagcctggaagctggaattgggtggagcccaccgcagctcaaggaggcctgcctgcctctgtagactccacctctggtggcagggcatagccgaacaaaaggcagcagaaacctctgcagacttaaatgtccctgtctgacagcttggaatacagtagtgtttcttccagcacggagcttgagatctgagaacggacagactgcctccccaagtggatccctgacctgcgagtagcctaactgggaggctaattatgtgtctgcccagtaggggcagactgacacctcacaagaactggtaccactctgagatgaaactttcagaggaacgatcaggcagcaacatttgctgttcaccaatattcgctattctgcagcctccactgctgataccaaggcaaacagggtctggagtggacctccagcaaactcaacagacctgcagctgagggtgctgactgttagaaggaaaactaacaaacagaaaggacatccacaccaaaaccccatctrtacgtcaccatcatcaaagacaaaaggtatataaaaccacaaagatggggaaaaaacagagcagaaaaactgaaaattctaaaaatcagagcacttctcctcctccaaaggagtgcagccccttgccagcaatggaacaaagctggacggagaacgacattgacgagctgagagaagaaggcttcagaggatcaaacktttccaagctaaaggaggaagttcgaacccatggcaaagaagttaaaaaccttgaaaaaagattagacgaatggctaactagaataaccagtgtagagaagtccttaaaggacctgatggagatgaaaaccatgkcacgagaactacgtgacgaatgcccaagcttcagtagctgattcgatcaactggaagaaagggtatcagtgatggaagatcaaatgaacgaaatgaagtgagaagagaaatttagagaaaaaggaatgaaaagaaacgaacaaagcctccaagaaatatgggactatgtgaaaagaccaaatctgcrtctgattggtgtacctgaaagtgacggggagaatggaaccaagttggaaaacactctgcaggatattatccaggagaacttccccaatctagcaaggcaggccaacaatcaaattcaggaaacacagagaacaccacaaagatactcctcgagaagagctactccaagacacrtagttgtcagaaccaaagttaaaatgaaggaaaaaatgttgatgttaagggcagccagagagaaaggtcaggttacccacaaagggaagcccatcagactaacagctgatctctcagcagacactctgcaagccagaagagagagggggccaatattcaacattcttaaagaaaagaattttcaactcagaatttcatatccagccaaaataagcttcataagtggaggagaaataaaatcctttacagacaagcaaatgctgagagattttgtcaccaccgggcctgccctacragagctcctgaaagaagcactaaatatggaaaggaacagccaataccagccactgcaaaaagatgccaaaatgtaaagacaatcgaggctaggaagaaactgcatcaactaacaagaaaaataaccatctaacatcataatgacaggatcaaattcacacataacaatrttaaccttaaatgtaaatgggctaaatgctccaactgaragacacagcctggcaaattggataaagagtcaacaccrataagtatgctgtattcaggaaacccatctcacrtgcagagacacagataggcccaaaataaagggatggaggaagagctaccaagcaaatggaaaacaaaaaaaaaggcaagggttgcaatcctagtctctgataaaacagcctttaaaccaacaaaaatcaaaagagacaaagaaggccattacataatggtaaagggatcaattcaacaagaagaagtaattatcctaaatatgcatgcacccattacaggagcacccagattcataaagcaagtccttggagacctacaaagagacttagactcccacacaataataatgggaggctttaacaccccactgtcaacattagacagatcaacaagacagaaagttaacaagtatatccaggaattgaattcagctgtgcaccaagtggacctgatagacatctacagaactctccaccccaaatcaacagaatatacattattctcagccccacactgcacttattccaaaattgaccacatagttggaggtaaagcactcctcagcaaatgtaaaagaacagaaattatarcaaactatctctcaaaccacagtgcaatcaaactagaactcaggattaagaaaatcactcaaaaccgctcaactacatggaaactgaacaacctgctcctgaatgactgctsggtacataackaaatgaaggcagaaataaagatgttttttgaaaccaatgagaacaaagacacaacaaactagaatctctgggacacatttaaagcagtgcgttgagggaaatttatagcactaaatgcccacaagagaaagcaggaaagatctaaaactgacaccctaacatcacaattaaaagaactagagaagcaagagcaaacacattcaaagcgagcagaaggcaagaaataactaagatcagagcagaattgaaggaaatagagacacaaaaaacccttcaaaaaatcaatgaatccagragctttttattgaaaaaaaaaaaaaacttttttgaaaagatcagcaaaattgatagaccactagcaatactaataaagaagaaaagagagaagattcaaatagatgcaataaaaaatgacaaaggggatatcacccccaatcccacagaaatacaaactaccatcagagaataccataaacacctcttcacagataaactagaaaatctagaagaaatggaaaaattccaggacacatacagcctcccaagactaaaccaggaagaaggtgaatctctgaatagaccaataacaggctctgaaattgaggcaataattaatagcatactaaccaaaaaaagtcctggaccagacggattcacagctgaattctaccagaggtacaaggaggagctggtaccattccttctgaaactattccaatcaatagaaaaagagggaatcctccctaactcatttcgtgaggccagcatcatcctgataccaaagcctggcagagacacaacagaaaaagagaatattagaccaatatccatgatgaacattgatgcaaaaatcctcaataaaatactggcaatctgaatccagcaacacatcaaaaagcttatccaccatgatcaagtaggcttcatccctgggatgtgaggcggttcagcatacgcaaaccaataaacgtaacccagcatataaacagaaccaaagacaaaaaccacatgattatctcaatagatgcagaaaaggcctttgacaaaattcaacaacacttcatgctaacaactctcaataagttaggtattgatgggatgtatctcaaaataataagagctatctatgacaaactcacagccaatatcatactgaatgggcaaaaactggaagcattccctttgaaaactggcacaagacagggatgccctctctcaccactcctattcaacatagtgttggaagttctggccaggtcartcaggcaggagaaagaaataaagggtattcaattaggaaaggaggaagtcatcttgccctgtttgcagatgacatgattgtatatctagaaaaccccattgtctcagcccaaaatctccttaagctgataagcaacttcagcaaagtctcaggatacaaaatcaatgtgcaaaaatcacaagcattcttatacaccaataacagacaaacagagagccaaatcatgagtgaactcccattcacaattgcttcaaagagaataaaatacctaggaatccaacttacaaggggtgtgaaggacctcttcaaggagaacttcaaaccactgctcaatgaaataaaagaggacacaaacaaatggaagaacattccatgctcatggataggaagaatcaatatcatgaaaatggccatactacccaaggtaatttatagattcaatgccatccccatcaagctaccaatgactttcctcacagaattggaaaaaactactttaaagttcatatggaaccaaaaaagagcccgcatygccaagtcaatcctaaaccaaaagaacaaagctggaggcatcscgctacctgacttaaactatactacaaggctacagtaaccaaarcagcatggtactggtaccaaaacagagatatagaccaatggaacagaacagagccctcagatataatgccacatatctacaactatctgatctttgacaaacctgacaaaaacaagmaatggggaaaggattccctatttaacaaatggtgctgggaaaactggctmgccatatggagaaagctgaaactggatcccttccttacaccttatacaaaaattaattcaagatggattaaagacttaaatgttagacctaaaaccataaaaaccctagaagaaaacctaggcaataccattcaggacataggcatgggcaaggacttcatgtctaaaacactgaaagcaatggcaacaaaagcaaaattaagaaatgggatctaattaaactaaagagcttctgcatagcaaaagcaaataccatcagagtgaacaggcaacctacaaaatgggagaaaatttttgcaatctactcatctgacaaagggctattatccagaatctacaaagaactcaaacaaatttacaagaaaaaaatgaacaaccccatcaaaaagtgggcaaaggatatgaacagacacttctcaaaagaagacgtctatacagttaagagacacatgaaaaaaatgctcatcatcactggccatcatagaaatgcaaatcaaaaccacaatgagataccatctcacaccagttagaatggtgatcattaaaaagtcaggaaacaatgggtgctggagaggatgtggagaaataagaacacttttacactgttggtgggactgtaaactagttcaaccattgtggaagtctgtgtggcaattcctcagggatctagaactagaaataccatttgacccagccatcccattactgggtatatacccaaaggattataaatcatgctgctataaagacacatgcacagatatgtttattgcggcactgttcacagcagcaaagacttggaaccaagccaaatgtccaacaatgatggactggattaagaaaatgtggcacatatacaccatggaatactatgcagccataaaaatgatgagttcatatcctttgtagggacayggatgaagctggaaaccatcattctcagcaaactattgcaaggacaaaaaaacaaacaccgcatgttctcactcataggtgggaattgaacaatgagaacacttggacccaggaaggggacatcacacactggggccattgtggggtagaaggasgggggagggatagcattaggagatatacctaatgttaaatgaccagttaatgggtgcagcacaccaacgtggcacatgtatacatatgtaacaaacctgcackttgtgcacatgtaccctagaacttaaagtataatttttwaaaaaagatcaaaaaaattacatcaggattttattttagtgattaaagaaaataaacacctaaaaaaaatcttttattattgacattgaagtcccttacaagatgatggtcaaattctctttgtcccacctaatttctagtttaaacttgtctcagaaggctgtgaattttctcatgttgaattatattacttttcaatttgaaaagttagcttttcccctcttttacagtgtcagtttttctagaatatttctctttccataagctttacctttagattcatgacttaggatctaaatttaggattatactattttaagcagactttgtgtttcttttacattaaaaaaatctttttctagcttttacctatcttttgccaaactttcttttgcaaattttggatagcaaccaaatgttttctgtttccttcagcctcaaggtacatattcagtaagtatgtaatcactattatatactagtgtctgttaattgtattaactaacatactagtgtctgttaattgtattaattaatgtgtgtacatttctttttattatagattctaaagcaaactactacacgtaggccatcatgttccaagtttttgaaagttcatctttttcatcttgttgataaatttcatcaacttttatgtaggtaattcaaatagaaatttgggataaattggactgattttttgggattattgagtatttttatttcagctcgttttacagcactgaaagctggagtaaaagacattagatatccctagtcacttgagacttcattttaaaagccagttgtactggctttgccatggctttgtcttggttttgatttctaccacatttcctcctcttcagtgcttcctcagcggcgtgtacttgagtatgcgcacgtgcaaatgaaaaaaacatggatatatttgtagtacctattatgtctttcatgctcattcaagagagatatatatatatatattagtaataaaactaaattttaaaagcctaaaaattaggacccagcctttttatatagacaagatatgtcatggagtcagattctatgaatatccagtgtgtaaaatacacacacacacacacaaacacacacacacggagttcacatatcaaatgaatgattttaacagtttaaatagaatatatttttagattgcttgaactgataatatcattgctatcaaaaggatttcatgccttttcaacatttagtttttgtttgtttgacatcttccaattttgtgtttaactctatgttgactttatcattttattccaaacttacgctccaaaatgcattgctgatgatatttatattagtaggcattctgtggaattgtgcttttacaggaaatacattggtaaatcttaagtaatcttaaattgtttccacagtaaaaaaaaaaaaaaaaaaaaaaaaggacttagtatgaatctgcaagaaaatatagacaaggtggacaccaaaaatagttttatttccatctgtaattactagctatgcagcaagtataaaaatatatatttgatatgtttccttgaatatgtgatgtggaggcagcaacactatttgtaagctttttaaaagagttatagtatctttgcagagatactgtactagggtctagagaccaataaaaaaggttttcatctgggctgctccacttactatcttgtgtgatatttaccaactgatattaacaaagtatcagtttgctgttttttataaaaggaacaaaaacacagcttttgtatgttctggagaggattcatatagatatatattacttgatacagtgcctggcatataacctacattctactaatggcatctattattagtagtaataattaaagtggtaatgcttacagaaggaaagggaatgtgagtacagttaagtacccttaataaatttatatattttattaggttcatatatatttatttgtgttactgacttttattatacaaatgttattgattacttttaatctcagatgaaataacttggaaacttagagaagaaaaatatttttattcatatagcaatattatataactcaaaacctccacatattcaggactcagattacatggaaatttaacaatcaatgtaaatcacaaaatctgtcactttcatctcattttagttttacttttttacataatatgctagccttttttgctttttctaagcacacatgttttattaatcataaatgtgaaaaaataagcggtgtattttgtcattgcttggaaaggaaacttaaagacaattaggtattttgtcaggggcatagatttatttataaaatttatctactacaaattgagttgttttaattcttcactatccttctgagagagattagaagaaggaatgacaatgtctgcttacatgggagaatactgaaagaaggccaccttaaatcacatggtgtaaattcattggtggtcaaagctcagcacacttccgcggtttgtcttctccatattgcttccttctgtatggatgcatacatatatatccatttttatgtacaatataaagtgaaggatgtatttaaataagttccatcctcattcagttaaaatattttatggtctttaattataaaatcatattttgaaaattgagctgactctcaaatcttttggcatagcattctatcctttctggcataaacttgagttaccactctaatctcattcctcacattgtccctttaattgactccctttaggcaattttgaagtagtagttgtttatgcatatctttgtcatagtctctctgacttctaaatatttgcaattactattgccttcttagattccatatcactcagttccacttcaaattggctaatagtaattcatttttctggtcttagctgggatgtcagtagcttctacattccaaattatttaactcttttgtacgtcccctctccaacataccatttccatacacacacacctcgggctctctccgtggtaactgtattttacctatagaatgcgaattgtcttatttttctgactcacagtggaagtgtcttcatagaaagggatatattttctttttttcccttagtgtcccctcccctctaagcaataaccataatatgcatttaataaaaagttataaaatacaaatatattcctatcatgaaggtgaaatttctgtatactgaaataaactgataataattttagtcaagactttaatcattatatcaaatcaatgtgaaactgaaaatacatgatgatactttgtttctatatctctgataaaatatatatatttatgaaattaatatagatagatttattgtataagaaatcaaaattatctgcaattctaccctctagtaatagctacttttgtggtacattttctgtttaattatctataaaactctttttgtacatattaaatttatcaatytataaatttccatctaccatttagaaatacaagagctccatcaagaatcatctcctgaaagctatgtattctttctttaatcttctaagtgtatgtgatagacatttgtcataaactttcatatgtttacggccttctattaagctaaaaatatttaattcttaattattgtacctaagtctataggaaacttagattttattctctacatctgaatatggcacacgtgcatacgtaataccataataaataattcaaacacatcatttgttgtgattaatgcctacaagagggagtaacaatgacatcccttgaaatgtctgtgttttatttaagttccaaagataactgttcyttatttaaagtttttatttgtttgtttgttcttgttttggttagtatattggttaataaagttgtttggaattttatttatcattatttgaattttctaagtcttataactcagagcagtaatccagaagttaccaacaatttccaactcctatcctcaggatgaaagcccttgaaatagaaatgtgagctgtggcataatggaagcatttggcagctattttcccctgctctatacatgagtgcatagactctaattcatacaaaaaagtttatataattaccgatttgcaacaaaatttacttttcatgtacttatgattctaatctatctcaaaagtagataatcaaacttttgtaaataacctttcaatgatggacaatgttattgctcctttacctattactacctctccctgttcttttcttcatcccaatcaatatgtctagataaatacatttttttctcatttgaaatttartttggaaaatgcagccacatttttacttatctttttcaaataattaaaaacttctacctcactcatgtaacatcttcctgcatgatctaatctgcatctaatttttctctgactagcagcactagatgttttgtgattagggaagtcagaagtgatgagactttaatagaacataaaatatttcttttctatatttcagtaagttaaactaaattatatttacctaaattatgtacgtactttgataaacatctcagataatcttgaaaataccaagcagcaatgaaggaaagtgtgagggaatagggagggaggggaaaaggagaagagggaaggggaaggaacaggaaaggaagggaggtgaggatggaagagttttgtgtaactggaattcttgagagtgaggttcttgataaccattgtcaatcctgggaaaggaagaattaaatcacagtcctttatcgtttgggtattatataactatcttattaaccattcaaaagaaaagaaaatgatagacattctgctttaaagcaagtggaaagcacagtctcatggaatcccatgaatttctttgaaaactgtctcaagttacttaaacttcctaaattgtattgtttttatttaacatgagtggtatttacagtacatatttgaagataaaatgtgatcaagtgagtacaacactctcagctgtgagaggcatttagtaaatacattacataataattaaactcaagatctcattttaagtgacacatttaggaatgagaagggaaggtcccagaaaaaagcacagtcagattagtttactcagaaatcgtagtttcgcatttgaaatatgaaatcccaacctagttcgtgtattacttcccttccctagttatcacagggtcggatttgtgtcagtctcttaaggtaaacattcctaaatgtgtagaggtttttggaaagaagaagcatgacaaaattaaaacaaactgaatagaatccattgggtcttttattaagaatattttttatttcaaatgtaagtgttctgaaactggatcagcaaaataatagcaactaagttatttaaaaagataacaggaaacaaagcatagacatttggtcttggatttaagcacattatgactctactgttgaactgtggttctgactcagtgacgcctacagtagaagaaaagatgcttaaggtgggacagttgtgacctaaaaattaaarctctaaatatttaagcttattttaagagcactaacacagcaaagcatatgcacagagaagaacatgaattatacactaatcaaattttaataagtggagaatattagtgtagaagtacacacctcaccaacaatgtgttgttgctgttttttcattttgcagggaaaagtccggcatttacagaaggcttttgcttcaagagtagataaatccacacagactgaactactatgctatgatgtaagtagctctgtaaaaccatttttaacttcattattggcattcagamctccacagcttattgacctctgcggctgctgtgtccatgcattgatttaacaggatttagcggtgcaccattcatcttttgctcttaaacaatccccaaatacctcctggaactaaaaaagatgattacaggcaccaactggcataccaatgccttattaatttttttacatcaacaattttggtacagtcttttgaattagtgtatttgcagacatgtagaagatatgcattagaagactagggcaatttattttttaagaaaatatttatttattaacagtttaataaagttactatgtttgtaatcaccaaaggtgaagcacatcatttttatatgcagacacttaaaggcaaaaacaactttgaagaaaaatttaaaataatgttttagctcttgggcttcagtgcaggcagcagaaagtaatttaattgaaagtatttttctgttagtgcgaaatacttgttgaactgtcaaaataggattgtaaaacatgttttaatacagtattacatctagtaacactggatgatttgggaaaacattgatataaatgctcatttttttcttaaacacagctaagaaatttgcattttgcctaagttcatgactttcaacttcctcttgatgaaaaaataaaggaattaatttgatcttgtagctaacatgtatgaggaccccctcttctatttaaaaacatttattcttatttttagcactttgctgataagtagaaataaaatagaaataattttaagttttatgatgatgaataatgataaattatatgtttatctgcatggtctcattatgttaaataacaaacttggatgctacttttgtgttgccgtgcaaattacattaatttaatataaaactacttttcttttaggaaataaaccaaagctttgaatcactgcacaaattgttttcaagtgtttatataccttattttcttaattaaaaacaacactaaaaaatatgaattaaaaattattcaattatgtttattttaaggtatatttactctagatatctaaattctagatctcaattttgtaactgaaatgcttctagcagtgttgtatgttacttaaattatgttgacatctatttttaaaaagaaataattttatggtccttaaagagtatttaccacaagtagttcaatattggtcttttgtgagggatttttttcctgtctaaaaacttggttttttgttgttgttgtttgtttgtttgttatttgagatggagtctcactctgttgcccaggctggagtgcactggcgcgatctcggctcactgcaacctccgcctcctgggttcaagtgattctcctgcctcaccatcccaggtaactgggattgcaagcacccgtcatcactgccggctactgtttgtatttgtagtagagacagggtttcatcatgttggtcaggttagtctcgaactccttacctcaaatgatccacgcgccttagcctccaaaagttctgggattacaggcgtgagccaccaccccctgcctaaaaattttttaatgaaaatatttatatgctagtccttaggatataaacccaatatgtgttttacaaataacaacctttgtatctataaatctgcaagacagagagtttgttcaatatgagtaataaaatcataattttcattaaatcttattctaatataacatcatacaacacagggactacaagttaaattagaatccacttacttcaagcccccaaatttttwaataakttaactgaatttcagaaaaatgaagtcacttttttactactacatgacgtttgttgggagtctagtcttttatttaaggtaatgtgcttggaaaagagaaaacaaatatacatttggattcaaattttcaattttatttaaagaaacaatgtttgggagacagaattctaactttttaaatgacaatataaatataaaatgtaagacttttatgtaataccatcaattttatgtgacactattagtgattgcttgtgagaattggttactgaggaatgaacgacacctctggggaaatgacttatctgtggatagttattctaacaccatagttaccagcagcctcttacgtatttgcctatccatgcctcataattttctaatttctatgatatttcttatatcaatgtcatttagttctctaagcatgaaaataaaaatgtaaaatgaagccawggtaattgttaatcctcattaaatcttcaatgttcctagcttgtttcgtatgttacagtgatagtttaatgcatcttactgtattgaattaaggttaaagaataatactttttttgacaatgagtccctaaagaatccccttcatatgagcaaattaaatttctaaaatatgcatgtaaaaacttatgaaagtaactagatgtaactgtaatactaaactttagggcatcttgcatgtgaaaaactggggatggaaatacttaaacaaatcaaaaataagtaaaacactttcagtatcataaactacataactggaaatatatgattcataaactgtacaatttctcccatgaccaggatatattttcaatatttatttgtaaatattttttaatattttatatgcaataataatcatttattcttcaatttatagtattttgttctgtttcaccctcaggaaatatagtttcaccttattttaactttcaaaaatattttatamacacatgtatctatttataacttgcaaattgtgtttattcaaaaacaagaaacatctcgtggaaatcttgtacattatggatgtttcttatactcttttgttttcttcttaaagctgccaacattagccacaaattgttctttacagattattatggatcatgttttattggtatgagtatcagaatatatgatactacatgtcatcattaatataatttccttgggaaaatagctgttgctacacattttgcttaagataagaaatagaattcccagaaaacattaattataataaaatctattaaaaattcactgccatgaataagtttaaagatttgtacaataaactacttttatcctgcaccagatttgtcaggagacatgaaactaatgttagtttacaatgtgctctgacttctaaygcacatggcaagacttaaaaaaaaaattcagagtgtctcagcacaggcctataaacaccatagtttttgtgatgagggagattgttaaataaatgatgaatgtgtcttaaataatcaatgccaatttaacctcttccacgttcctctgtctgcacaggcttagtttattgaaagatcaaagaataatttcttaggtgtcactgtgttattaaaacaggatagaagatgaatagatgtagttaagtagcattgctgcccatttcaagattacattgaggggtagggaagttttttatctaattacatcaaatgtataaacagatgtttcaatgtagtatatatgctgtctgtaaatattttatagcttgaactactacaaatagcattttgattacaatatttgagaatgcataatcaaaatattctaaagatcttatattctgacagtgagaaattcagatactttcattaatttgacatctttatggacagcttatgtcctgaagaagattgtttttgaaaatgtgacaggttgattgactttaagttcaagttttcttttcagataatgcctgaaattgacacagaatagtcagaggatttaaaaatttctctgagccacaaatgcactaaagttttaagtaaagcagtttcttccttcattagcatgtgttttacactaacatttaataagaagccatttttagtcttgaacttggcagtgttttctttaagacttctgatgttatcaggtatttcattaaatattaaattattattaattactgttagtttaaatatcattaggggtttcaatttggcttcttaaaatggactgaactgtggcatcacgtattttgtctcattcatgtatgaataaagcataaatcagtttgttaatggatgctcataccactgtttattttttcaaatattttaacacactttccaaatggtgggatttgctttataaatacagttttctacttacacatgaggaaaataatattatttgcattatggatgtacactttgaaaaacttttcaatgcaattatctgtgtatttcacaatctctggtacttttctcagatttaattttggtggtgctcctggcgcagtttgcagatagtcctaaaaaatatgaaaatagttcatcatgctgtattcatgttaggaataagaatgattagtttttactgtaattgttttattagatagagcagaagtgttttttgtgcttgtgctaatgtattatgtctgcctgtggattaagccctgttctaagaattgaataactatcaattaggctttctcatcatgctgctaatatactgtagtttattaaagtttctgttttgctyttatttattacttctatcttcttaaattcagtacttctcctgatcatgtatgaatgtgctctggcatttattagaaaaaagtgactcccccgcacatgcttcatgtatttatatttacttatctcaaatatttctgtttatttttacaaattaaaaaacatttagttttaaaaattgagttatatattccaggtttgcttatgggctataatttttcccattacattaaagataacttttagataagaacattgtttaaaaacatctatcatgtttaaaaacatgattatctgccacgggtgcttattaacatgtaatggagtcacatcttatccagtggtaatgttctaagggcatcacttttgaaaatttattcatgctttcattcaacaaatatgactaagtcccctctagcagccagctccattctaggtccttggaatatatcctttaaccaaacaaaaaatattcctgcatggagcttgcaactggtgagggcatacttaaaaatcaataagctaagtaaataagcaaattatataatgcatttgaaggtgctgaaagcaatgtgaaaaataaaaatagcacagagaaagaataattctaagtgtatagtgggagggtcaagactatgatcagaaattttaaatagggtgatctagggaggtctgagtttgagatttgagacttaaagaaggtgaggtgaaaatcgtgtttaatcaaaaattcctttgtgatgtgcttcttgaaaattccttgacrtcccttcagtcagtaagaactaagcactttgtcrttgctggagccctagataagaatagcttcatttacacatcatgtagtataaaaattatattctagattataaaatctagattcaggctcagtacatcaagagactcacactagaggaatacggtctacctgagggaacagccgacgcaacttctatatcatattcatctagcataagcactgagaagaaatctgcgtaaaatcaaccacacagtattaattacatttgcttctcctctttctgtttgttgcttgcattcaccctaccctcttttttccctgaacactattcttcttccagagcagagttggatttatatgctttaaatgtataattagacctcattgtatatcagcgtatccgatttatcagaggtgtgctggtgaaactaaacaaatttagaaagcactcaatgattacttggtgaaaaaaaattaactaaaagccactaattttttataattctaaaaatttataacaaattaatatgcattgtttcattcacaaaacatacaggtatggatattgctatatactatattattttctatagtacttttttatatccaacaagtatttaaaaattactgcgttatgccttttagaatgaagtattaaactcaaawcagcatagacaactagtaatgtctaaacataagtgccaacatgcagttgtttttatagtgtkgcactgaatgattctttttaaaatcttgaatctttgcttaggagccagatccccctggactgccaccaggtctttaattctgcagtgactacatagaattagtatcagtgaaccaaaagcccttttgttaagagaatgtgtggttgagatcgttatgaggaaaacagcaaggctagatgtcatctatgaaagttcttataattataaaaatattcattaagatgaaacagcacacgaggatggggagagaatgagttgttgctggtccaaggttataaagcttgagttgcagatgaaataaattttgagatctgctgtacagcagggtgactataattaatgataatgtattatgtatttcaaaataactaaatttcaaatgtctcactacaaaaaaagataagtaatgggatggttgatgtgttaatttgtttgatttaatcattccacattgtatacatatatcaatatcaaaatatcacattgtatgccataaatgtatacaatttgtcagttaaaaataatgttaacttaaaaaaattgaaaagagtacacacgcaggaggttttatatagtttaaaatagtaataatagatatcatatttgctgaaaattatgttgtggtagtgttgataaaagagaagaaaaatacatatttgttgaatggaaaatttctctctgtccacttctacttccaactcatagattgctacctttataggaaatctaaatttaatttcaaatttttctaatatttttcctagactgccttaggagtctcttagagtatctagtgtactaagtgagattatataataagaagtcctggctggrcagggtggctcacgcctgtaatcccagcactttgggaggctgaggcaggcggatcacgaggtcaggagatcgaggccatcctggctaacacggtgaaaccccrtctctactaaaaattwaaaaaaaaaattagccaggcgtaggtggtgcacgcctgtagtcccagctacttgctactcagagactgaggcaggagaatggtgtaaaaccagggaggcgtagcttgcagtgagccgagatcgtgccactgcactccagcctgggagacagagagagactctgtctcaaaaaaaagaaaaaggaaaagaaaaaaaaagtccttacagaaagaatttttaccaccctttggaaggaaacaccaagtataagcttgaagtatctctcattatctgtttacaaagcatcaatcaattgcagctaattattataatctgtatgaagctaagttctatgacttagttcaggtacttgtttaaagtaaatttttgtggacttatattaatttatttctatcaaaaacattgctttcctttgatgtggtctacaatcaggaaaaatttgcaaaaggaaatttatccttattttatawatatatatatatatatatatatatacacatgacatatatatacatacatgatmtatatgtacatatatattgacatacacacataaatatccttgaaatatatatatatatatctgacatatatttgaaatatatatattcttggaatatatattatatccttgaaatagatgtatctccttgaaatatgtcattgaaatatatatctgtacatacacaccaaaacatcgtctattaatacacacacacatgcacatatatacacacacacacacaaataagacataggtacaaaaagtttgcttttatttgatgtattattcctattatagaagttagaattagatgcattctttaatttttctgtgtatataataagaattactgggaatcatctcttacattaacacaatgtttaaaatgcttatttgaattttaatatgattaaattgaatttatataactattagctaggaatatttgctgtccattttattatacttggtacatattaatataaagatgatttctttttaaggtggtattcaaattaactctcagaaacactaattttttaatcgcagaaatcataaacccatataccttctaatgaaatagtgataacaattttttccgtaacatagaagatggtattttgtttttcacagtacactagctcatggcttttctgttttgtcatggtagagcttttgtttcactaggcwatcagatttcattaagttacctaatttttccctcagttttctcatgagatctgctattccctttgacaactctacttgtacttgatttagatgcacaaaaagggataatatgtaccaagagcattggtcctcagtgtggtctttgtccatcaaaatgtttttcagctacttgattaatgctttgggatttgagaatagctagcttctaccttttgccagtgaaataactgatattgatttgagaggaaaaaagtcattgaaatgtttacattaatagtgtttcaaaataaaactgtaaagggatttttaacttataaaaagccatagagagctaaagggaaaatattccataaatgtttggcttaataacaagccaacaaaagaacatggattttcagaatattatattagaaagtttcctaaaagaaagccacatgtatcattaaccttatgctctgtaaaataagaataccaggaaattttactcttttttcatgccacattgttaagatggtaattagaattttaaatttataaagttgatctattatagagaaaatttataccaaaaagaatgtaatttgcatttcagagtactkaaagcatcaaagttctatacataccagaattatttcaggtttgccattattttatgagttctctgtttataaatggctttatagatttgaatttaaactatcayattagaggacatttatttaaagtgtggtctaatatagagtaactttctgagagaaaagtacttaaacaggtttagcattttgttgtattggaaaagtataccctaaatatgaatgaattattcataagccaaagaaagtgctaatatagaatgaaaagtattatgtttttaagttttgggggttataagaaacacttagagcccagcgcggtgcctcacacctttaattgcagcactttggtggcccaggcgggcgaatcacccgaggtcaggagttcgagaccagcctggctaacatggtgaaatcccttctctactaaaattataaaaattagcctggcgttgttgcggacaactgtaattccagctactcaagaggctaaggcaggagaatcgcttgaacccgagaggcagaggttgcagtgagccgagattgtgccactgtactccaggctgggtgacagagcaagactccgtctccaaaaaaaaaaaaaaaaagaaacaatgttgttccgtctcaagaaaggaaggaaggaaagaaagaaggaaggagaaagaaggagaaagaaagaaagaaagaaagaaagaaagaaagaaagaaagaaagaaagaaagaaagaaagaaagaaagaaagagaaagaaagaaagaaagaaagaaagaaagaaagaaagaaagaaagaaagaaagaaagaaagagaaggaaggaacgaaggaaagaagaaaagaaagaaagaaaagaaaagaaagaaagaaacaatgttgttccaaaaatgttacctagaagtgtgtgtgtgtgtgtgtgtgtgtgtgtgtgtgtgtgtgtgtgtgtgtgtgattttattttatttttttttttgagacggagtctcgctctgtcgccgaggctggagtgcggaggcgcggtctcggctcactgcaatctccacctcccgggttcaccgcattctcctgcctcagcctcctgagtagctgggactacaggcgcccgccaccacgcccggctaattttttgtatttttagtagagacggggtttcaccgtgttagccaggatggtctcaatctcctgacctcatgatccgcccacctcggcctccccaagtgctgggattacaggcgtgagccaccgtgccaggatgaagtgttttttttttttaatttatgaaaaagatgctacagaccctaattgagtctgaaaagattaacttttctttgcaggagtatcastaatatgacacaattatatgtcataaaagtacaaaactaaaaagaatttatgtaattcataaaaatgtaaaaaaatacttggtgtgagtgtattattttctatacttttggaagtttttttttttctccactttggttttagtatgttaaaataatcatataaatgctggattatgtataaatatattacaagtacatatacatgtcttcatatatgtttttgacatgtcaaatagatgaatattattttactgtaatgttaatgaatgcattttactattcataatttaaaggactgaatatcattcaatcacgtgaatattttaaacattttttacattttgttttaaattttctcctactaaataataacaatggcacatatcctttagaagagaattttgaaaactctaatataattawagtcttatcctacacctagcaatggtatctctagaagtttaacctgaacatacactttcatatgtaccaaataatattttcataaggttttctttatgatcattttttgtaacagttaaagaagaaaaacaacacaaataacaataggaggctatttgataatggctcattatcaaatgagttacagtataaggacaaagacaaatgcaaaaaacatctaaaacttcaatcagaaacaaaattatattactatttttataataattgtgacgttatttgtgtgttataacatttaacaaccaaatctaatgtttctagcatccaagttatttcaggataagagaaaataaacataactatgaaaatacaagttaaaggaaagaacctgataatgttatattcaaatgtaaagtgtcaacatgaacttattatttgctaattgaagaatattttcttcttttgcccctgaaaaagtataaacctttcaagcttataggcttaactttcagtagtcaggaaacaggaagtaggtggataagttaaacaataccatgaatcaaaaatcagacaaaatccaaatgggcagtattctacaagacacctcatggtatccctaaaaaagaagatgctattaaaaattgggrgactatctgctgggcatggtggctcatgcctgtaatcccagcactttgggaggccaaggcrggtggatcaggtgaggttgggagttcgagaccagcctgaccaacgtggagaaaccctgtctctactaataatacaaaattagctggacatggtggcacatgcctgtaatcccagcaactcaggagactgaggcaagagaatcgcttgaacccgggaggcagaggttgcagtgagcctagattgtgccattgcagtccagcctgggcaacaagagtgaaactccatcacacacacacacgcacacacacagacacacacaaaataggggactgtcttgattaaggaaactaaacagacataacgacatatgaaatgcatatatatatgtatatatgtgtgtgtgtatatatattatatatatatgatgaataactagagagagggagagaggaccaaaagcagctatggcaactcttaattactgaatctaggtgctatgatttcaatgttcatygcctccaactctcatgctgaaatttgattcccaattggagatggggtttaatgggagaatggggggtgtttggatcatgagagagatctttcattaatagattaatgcccaccctgggggtgagtgagttctcactctatgagttcctgagagagcagtcacctccctgctgtctctcctgcttcctctcgggtagtgagtgtcctgtctgcacgtaccggctccccttccatttttgccacaagtggaagtaggttgagactttcaccagatgcccaatcttacagcttgcataatcctgagccaaataaaccttttttaaaaataaataaactacccagtctcaggtgttagagcaatgcaaaatggactaagatatgaggtgaaggctacacaggtgttaatactacaagtctgtttttctgtatcttaaaagttttctcaataaagggaatggtttcccaacttaaaaatatgcaaaaatatttaaatggcattatagtaagatgtaatatatggccaggactaaattgggttgggaagtccagcagtaacatgtatttgagggacatctgaagaaatttgaacaaggattgctattagatgtaatgaaaacttatttacatgaacagtttagaggttactactggggaaaaaaaggcaagtaaagtgaaaamcacaatgtactatgtggttctctttttagttaaaaaaaataagtgcaaatgaatccagaaagcttggtatagtgatgatctctggtttgtaggaatgtaccattttatttccttatttttgtttatctctttttgtcactttttgcaatgaacatatgtatttttataataataaaatatactttcaaagtagaaatatattatttaaaaaagaaagctcatcactgctaacatgaatatgaaattatttgcgcaatgtatttactttctattcaaatctactttcttacaaaataaaataacttggaaaattttgtggaaacagaatttaatgacaattttgtttctaaaatgtaattattaaaaataaatgttaaatattgtagaatttttctttctaatttgacaatatattgaatgcattataccttaaagcccaagaagattaacctattttgtaactgattttcctagtttataatatccccagagtggtaaatcataaaaaagaatctttcaaattattattttcactacaatgtagtcacaggaagccatttgttctcattaggtgaactttactatttccttgcagttgtcttcatgttctacttgcttaaaatgacacagatggattaagttttttttgtccacttcacatcacaaatactaaagtattaaaacttttatggaaagagaaatgttagtatcatatattttcattacatgtgtgtctctgaacatattcaggctattatggtatttttcccttcattttactattttaaaattaaaaagtggatctgggttagactttcattaagtatatgaatgttgggaaccttaaaatacacagaaaaacagaattccagatttctaaaatgtataatataacatataaaatatattctctctgtctttcacattcactcaactagtatttgtgtaataaatactgaatggcaggcatcttcttaatgtttaattcttagtcttaaagattttgcagaccttttttaaagaaaatggttagtaataacgtatctgcatctgtgtgtaacatacagttatagtcctggtgttccttttattacctctattcatttataaagttatgtaaaagaaaaaaaaagagtaagagatattccagacactgagattgtagcagtgaacaccaagcatacacaaccagacaagtttttttgtcttcataaacctcatattctagtcaatgaagacaggcagtaaactaaaaaccaaagaagtaaaaaagagaatttcacaccgtattaagggcataaaggagataaacagaaagatgacattaagagaaaccacgtgaagggaaggagctactgtgtagaaaagagccatcagggaagatggttctgccaatgttgcatttgagctggaactcsagtgatgggtcactgttcacagaaccagaacaagcatggtgacagggaaaatcatactaccaagaacattcaactctcaatcctgctgagtgcttcaggatttcctcatattgcttttggtcttgtcatgttacacattctaatctatataacacacagataaatttgccgaaaataaaaaataaatgcaaacacacagcttacgtcgtgttgtatttctaatttgacacacacacacacacacacacacacaaacacacacacactgaatggctcaataaggcatatagggtagaatccacactccccaagccagcatccatggctgctaaaattgtaccctcccctatttatgcaattagaacacctactgttttcaaactaaaaccttttattccatcaacactgattcattacaaactgttaatcattttctaagtttttaggtttcattttggtttctttttaaccatttcatctggaatacctctgccccacaatatatctgtattttaagccaagctccaatttcatatccttgattggacaacgcaaacaaggagtgatttctctttctgtagaactccctcagcagttatcagttctatttaacctacctttacagttaccagtcctatataatgttgccagtttcctatattaacatgtatctgtcctattgattataacttaccatctttgtagtatggctcatcctttcatatattcatttatatcactctaactaaacttttacattcctgggagcagatatcatattctatgcttcttgcaaattatacttcttttcatatatattaccagcacaaaatgaagtctctttttgtaaaaagggtgacatattttgaaatgtcttgtatttcttattacttaaaattgcaataaagtttagagactaaaatataataataagataataattgttgcagattagcaaaattctgttgaaactttgtgtttatttagtactttggatggtgactacgggttgcaaaaatactaggacagccacgtgagacttatgtagtgcttaattatttaattttcttgcagttttctttaagatggaagaatacataaagaaaaaaagtttattagaacttgtttttgtactctaattataaaaccaagggaatgaaaatatttgctaattaatcttccctctttaatctcatgtttggtaatagagcatgtttaattggaagttgggagcctataagcattactaatatatttgttataaatgttaagagcaatttttgattgagaaaatcataaatagaaccgttttatgttggtctgtgtttgttaaaagtgtgtgaacatttaaaatattcatattaagtaaaatttcattttattttattgatttcattcatttctttttgttttcttcttttcaaggccctgtggaatcctacatgcactgaaggtttatttaaaccagtacttatttcaacttaggttaaatcattatctgacaataagaaatgcatcactaatctgtgacatgtaaaatattgartaaaatcaattttttcatcatttcatattttaagtatgtaatatagaaaaattttcagttcaattacttcacaatttttgcatttgcaaaaatcatataaaatattgatgaattaagattcaactaacrtatttctgctttattctcattgtatttttaaaacaaaaatagattttgtttaaaaaattctttctatwtgtaaatattctaaaatgtaatattccacttggcactaagtatttttgttcactcttctcatccatgtcattggtctcccttgttatagtcttaatttaatttcatcacatattctttgtagattagatcagtttgaaaacaatgcctttagtgtcttccatcttagtaggacatttcctactgaagaacaaaattatctacagtcttttttccctcgcatcaagaccaaaatatgaaagcagtatgtctttaattagaataaataatgaagagtcttactctaactacagaaaatataacacctgtttagattcctaaatagttgaagatggtttattggaaattaacctcatattamagggagtctcctgaatgtatcctaaaaggatatctgtggcctggacttgaattgcttcctgatttctgtgtgtctctgtctgttgcctttgcataacaggtcactttaattatcaagtgacccggtggctacaaggcactcatgaatgttgcagtttactgcaaggataggtgacagagatagacagcccaaaagaatggctcaatgttgtggtcagggttcagggcaatagaaatgccatagagccaagaagaagaaagcaggttttactgagagttctacctgttgggcaaacagacaaggaagtaatcatggttaatggtggtaacctttataaatatgttataaaattaattaaattatttcaatcattatgtaacatgtattatgaatcgtaaatgctgggtgcaaaacatggtattaaaataaaaactataaatatatttatttacacaaaatggtgtatttgcccttgttgattttgcctcttaaaacaccctccgtgatctaaaatacaaraacattttttgtttttctaacagttttctagagttccttctttatcctattcttatctctttctttttattgtcttattttatacttaaaacctttaaatgtagataatgcaaaactccatccccttaaattaaagcactcccctgataaaggtttttatctacatgaatggtcaatactgtattatcttgaagaagcaagaattcaattgaagatcttttaccaggctaccaagacaaaataatttgtattagcaactgaagtaagtcaataaagaaaggtacattttttcctcaaaagcaatttagcagaagctttaactgcagacaagaaaaggtcacctaactaggtacaattttatgatttctttttaataccagcaaaacattatttttcttccctccctcccttcctcccttccttccttctttccttccttccttatccctcccttctcctcctttctccttttattctttccttgtaattgaatcaattctaaatatacatcagtaaacatgtttacatatcaataattttattttcaaggggaaatattttcagactttctcacagtgttcattatataatttgtccattagactcttaaagtgttttataaatatttatttgattacattaaaagtgaaattaaaatagggattaacggggatgttgtttttgtttttagaaaaatgcgtgagaactgttgtaatttttgtgctatattccaacgtgtaaaaaaattatggttgataattatttcccaaaagggggacaagagacatcagtatttattgatcaaaggaacattattttctgctgttatgccagcatgtttgtccaaaatgttctcacagttattaattcaaaatataagattgagcaaacttgtcgtcatctttcaaataaagaaactaaaatttgaagaagtcgagtaactttctcaaattcatatagcttttctaacaaaagacaaagacatagattgttctcatatgccccagaccaaaagtcagggttttgttttgttttcctgattccaaaatgctggtgggttgtagratagcagaattaaatrtgatgtatgcattgattacatatgcacatatataattgtgtattatgtatacataatattactaagcttgaattttgaagtactctttatgaactagggataattgcaatggtaaacacttactatgtgaatgctacctactatgcctaaggtgtgaaatgtatgagttaagggaattattttataagagtgagaattatttatacaaatatagagaaatgcatggaaggaaagccatggacccttttgctaggtacttcaatgactatgaacatattttatttatgttttaaatcattctgacaatttaatttgaatcaccaagttttagaatgtaggcacttatcattrtctgttaagtttattacatatagctatgttttaaatgattttttaatgaagaccctaaagtaatatgttattatatgtagatgttactatatgatatacatatgattttattgtgacacacataaaaacttccttgctgaagttatccaaattgtatcattttccttagttacctaaatttaatattgttttaaatatttatttctttataaaacaaaatgcaatttctttttcatatttaacttgcaactagaagtagaaatgtccaaattaacaaggagatgcttttcaggttgtattttgagcttacttctccttatagtactctccaaatacagttatatactattttcaatttttaatatataatcactctctctaaaacaaatctctgtcttgttggtgattttttaggtaatcaccaatattatatgctggcaccttgaaaaacaaacagtaacactaactcattttcaaacacatcartttcatttgctatatttacttgaaacaagtctacatgtcaatgaatagatcgatgtatatatccctcattgggggaaagacaagctattctttcttggtgttaataagcattaagagttgttagaatatcctgtcttctatttttttttcgtttgtttgttttgttttgttttktttgagacaagttctggctctctctcccaggctgcagtgcaagtggtgcgatcttgaccctgcaacstctgcctctcgggctcaagccatcctctgacctcagccttccaagtagctgggactagaggcacacaccatcatactcagctcatttttttgtattttttgtagagatgkggtttcaccatgttgcccaggctggtcttaaacttgtgagctcaagsgatccacccaccacctcggtctcccaaagtgctgggattacaggtgtgagccactacgcccagctgggaaatatcctgtcttttaaatgacatcttttggtatctgaatttgcataatggagaagattatgataggctataaaatggggggaagaaaaaatatgtaagcatattattttatctcttacaccaaatcgtactttttgaatctatgcattggtgtgctcttgcctctcttgtgtgaagccttttttaaaattatttttctattttcctctttgatttttgtatggggatacacatacaagaaattgatgaacaaaagtctcaaatgataataaaatattttctggctactttcttactatctgaaagctgtttgcctccttaatttgtaaacttgtggtcacgttatatatgggcacacacacacttttatgggaaatgagggtttcctcatttaaaagctatctttgttaaaaaaaagaaagraacttgatacagaggagaaaatatgtaggtagcataagtattctttgggaagaaataaaaatggcaggtgaatgctaattttatcctgatggagaaaagcaattattgcagcaggggtaaaaagattgcttcttccctctaagatatagtttagattttttaacttacctaaaaaaattatatatatttaattaaatatgtatgatatatagaattaaatatatattatatataaaatgtatatattatataatttttaaattatttttcatatatatatatatattaaaggaagtattccctcacccctgtaaggaagaataagcagtaactgaaactttgatgaacagcctggaaggtatatgtgctaataaattttgaatataatggtcggggagagtgaatgaacctcatgccttcatgctcaggctcttcagaaaactttcttcctaatgaggctggcaagatttctgacctgagaagaaatttctgtgtacattttcactaaagataacaacagtaagcttgaaagaacaagtaactttggcaagaaatatgctacacagattttaattttgtttacctcgtggttcatatattccttaaaaagttattgtgttcatatagatttagggttcaatttatatttctagtacaatttttatagaacgttattttgtgagttatccattttgagatagtgatcatcttacagcctttcggttgtagctacatgaattttaagaataagatcctgaaaagtaatgactaacctcttgaaaactacctgatccatttcagtaatgcctatgcaacatgagtaaaactttacgcaatatactaataaacatgtactctaaaagggagagagacaggaggcggagacagaaagagagagagagaaagaggttcttgttctatcacccaggctggagtgcagtggtgcgatcatggctcactgcagcctcaacctcctgggctcaagcaatcctcctgcctcagcctcccgagtagctgggactacaaacatgagccactgtgccaggctaatttttttttttttttttttttttttttttggagatggggtctcactatgttgcctaggctggtctcaaactactggcctcaaaacatctgcctgcctcagtctcccaaagtgctgggattacaggcatgagccactgcccccagcctgttacttttgtatcggaaggtaaactttagaaaacaagtaagcaatttgtattgatttaaaaagtgaaaaatatcaggccggcgttgtggctcacgcctgtaatcccagcactttgggaggccgaggtgggcggattgcctgagctcaggagtttgcaaccagcctgggcaaaacggtgaaaccccgtcgctactaaaatacaaaacatgagctgggcgagcggcttgagcctgcaatcccagctactcgggaggctgaggcagagaattgcttgaaccccggaagcggaggttgcagtgagctgagatgacgccactgcactccagcctgggtgacagagcgagactccgcctcaaaaaaaaaaaaaaaaattgaaaaatacctagtagaatgctatgtatccattggaaatttattgttggttattaatgaaaaaaatcaatggtgagctaatacaaaagaccgcattgtcaaattagactcataccaatcagatatcttaccccaatatcaaggcttattattcatttcacttaaggaacatattattcatgacacttaaggaactcagatgaagcaggaacaggtctggggtgtggaaggcagctctccaaggtctttcattcgacattgaacatccactttgagatccacagtcatagctcagatctttaggagaagttttttggaattacctcacacagcagagagagtgtttcattcatgaaatatctctattttatatcccaacattgtggcattttccagagtgccatgctcataaatccataaattctaagttcatttagtcaaataagtccttaacctgggacatgctgttaacatttccatatgtaaggaccctccttctaccaaatactattagtctattgacctgcaggactaattttcttgttgacagagattagaagttacctgttttctttctcgtgaagacaaatcagttgctataactccttcttccccacctgctctgtctccaccattcactctgagcatgatatacaccattgacatgaatggtaaatcatgtcttggatttttcatgtctctattattgtgaagaaaatgctttatagaaaatgtttatctgatcgagaccacagttattttggtttctcytccgtgttttgaatgttttaaaacaagttgaagtgagagataggagagattgcttttcttgatgattatctttatgtttcccttcattttttcactttcagcaaactcagaaattttgaaggacaaagaatttagtgatttaactaggaaaaaaactaatattcagttttttttctggatgtgtgtcataatatactacaaaaagagaagagccaataatttaaatttatatatcatattttaaattagaggtattttttaaaattattttttcatttgctatttatgcagaattagccctgatagaataataacacattcagctaaatggaatggatcatgttccttctttattatgtctttctttcagttatactatagacttcattacatattttattgaatataattgcctttctcaaaatacttcagatgttgttttatttaatgagttataaaatctgtgttgttttatagtccattttcttttacttggtgtgtatcagaaatacatgacaattcccataagagaaaacacataagaaaacccgaatacaatatttgcagcctgatttctctgttctcctgcttttccacaaacagactgtgttatttctaccctcaagtctcagcacctttagtgcccgaaccgctaatgctatttcttctcgcttagcttgtttgtatgaaaagaaaaccaagttccatatgcttctccctaccccaatatatttcataacttctccaggcatcattgaactctatcttctctaaatcactctacagttcaataatggctaacatttttttttaatctatgtcaggggttgttctaaaagttttacatattttaaatattttgatcctcacgaaagctataaagtaattactctatatgatttccttttacaagaaagaaaactgaaatatagaggagttaagtaacttgctcacaattacatgactagtattattagcaatcaagtattctgctcaatagggaaatatcacatatacatcacattggtatgccacttttcaaaaaataaactaaaattttaataagataactttttgcctttgatttttataattacaattaagagtgacactaataattataatgattgatataatgctaattttataagcatgagcaaatacaagatactttaattttaagtcctcgaagagaataatgactaatatttattaggtgctgctgtgacaatgttctaagtgctttattatgtatattgacttatgtaatcttaaaaacaacagcaaactcaagaaagattgtaatattattctcaatttatggaggaggctgggtgcggtggcccatgcctgtaatcccaacactttgggaggctgaggtgggtgtatcactcgagattaggagttcgagaccggcctggccaacgtggtgaaaacttgtctctactaaaaatacgaaaattagccaggcgtgkttccaggcgcctctaatcccaactattctggaggcggaggtaggagactctgttgaacctgggagactgaggttacagtgagcctagatcatgccactgcactccagcctggaggcaagactgcacctcaaaaaaaaaaaaaaaagagattatagaggagtaaattatgacctagaaaggtaacatgaaattcttaaggctgttcatgtcaaacaaatggtgacataactagaatgtaaatataagcagtcttgatttcagattttaacaccctttaccactatactgtatccaaacctcacccatagcacagaataaactatatccattatcagtcagagtaagctagatggcactggagaaacaacaattcccaaatattagaagtgactcataacatcaaatattgatttcttgcttgtgctatgtatctattgctgttcagcaagcaacgcttctccaggctccctcactctaagactcagactggtggaacaatcctcctctgttatgttgcagtctcagcgggaaagagaagaatgtcttagattgtacaacagatcttaaatttccacccagaagtgacatataatacttctactcatatttcattgatcaaaacatagcaagtcacatgatcacaggtaactcactccagggagcaaggaggagcaaatcaacatatgcctacaagtggggaaatgaagtttaaccagcaaacagcactaatgcctactattttatctgtttttccatggattaatctggtcttaatgaaaatatggaaagtatcatttggtaaatatgctatgttactgacacgaaatatcttggattccatcatgtttttcagaaaaatgtaattaaattttttaacctgtaattgaatatttctccttaatatatcacatgtacataaagctatctcamtttttaacatatgacataaacattatttacaccatattctccagctatgtttcagcagctcaactagatttttcaaatatttcaacattttaaaaaatatttctacttgcaatcaatgcattatctactgaattgcctggaacttgttgatattaccacagtcctattccagcttattttaactattaaaacagtcatacttgctgatatataatctaagcattattatacttgtcagaattaattcacaatgacagtgttatttcaacaacactttttagtcatttatctccttacaacctatcatgaagcacattttttcctttgcaagtatctctagagactgtaagtgacaagtataatatcttaaatgtgtgaacaaaaatgactttcctgttcccaaacaatatgctttgcttgatccagaaatagataatttgcatcaactgaaaaaataggtatcatgtaattttttctctgtgctaacttaatggtaaaccttcccatagcatctcctaaatcatgtgttgtattttcaacctttaagatataaaaatatgaccacctttaattcccacattacccaatttacatttgtacttaattagaaaattgtctactgtaattttagttcataaacaaagtaaactgcatctttctgcccttttttcagtgttgagtktaaagtgaaatccttggtactatttttttttccagtctgtaattaatttgcgaattcctactatagtaattgattcaaatggttttcattgtacaacaatagttaggtaaacattcattatatcaagatggtggttagcattacccaaaatctgttgttttactttaactataatccaaatataaatgtaaatataaataaatatatatatgaaattagtgtcttcacttttcaggcaatcttttccaattcattttcaggatttaaaaaataattattgaagctggaagagaacattaatcagagttttagagatacatattttcttgttctcaatttttttcgtttattctttttctatatttacaacacataggatgaaaacaaagatttataaatacgagaagtattatgaggccatgttttattgtcacaatttaaaatcttgtcaatagaatttttaaattaatacacagattatgagaatatatcaattctcactgtttggcaataattttctaagttttgtagattctgaaattttaagcatttatatgcatcataaaattgcatatttacatgcattcttatgctttgtaaaaaatagaattaggtaaaatatcagactattaagttcagcataattttatttctcagtcagacttctctaggaattcatgattcacatgaattcacatgattttttgtttaattatttattcaagaaatgtttactaaaaacttacagtgtgttgggtccttaggctatgaaccrtataayaccacgtactgaccaaccacagatgaatagagtctagcaggatatgtaggcataatcacaatactttttaatgttattataattagcgtaacaagaatatgtctgacgtggaatgtgataattttatgagcataatgtattttaccacaattagagatcacctttcaacttattaaattttaggattatcttataaatttgtatagagaaagagatgctaacatatttagtacctcatgagtatcagacacagacctacttggtgctttttgatatgttctgtttactcttctgcttccttttattaatttttrtatgaaaaagacacatttgatgtctgtttatgtgagcaatctgctgcatagcaacccaatttaatcttttcggttccatcaaatatttaagaatttctttacccttaagaagaataaaaccataatagagtagatkatataaaaacacataacaaaataaatacctaacttgcaagaatattataatatcagactggtaaaacatattaaactgctaaaaaaaatcagaacataatacggtaaataggagtgtgtagggtgtgtcacaatgattttgttgtcactacagtgagtcagggggcaacaccatctaagaattcatttgttaactaaattcccaactggagttataggttttgttttcatgtgatatatgaggaaaacgaatcattacaatgcaagtaaaataagtgccatgtccttcatgcattcattcatttgacaaactatgtactgagcaactgttttgtgccaggtatttctgttgttgttgggcatacacagtaggcaaaataactattattcctaacctatggcatttacatctcatttaatagccataatgattctaagtagcagactctagaattatccctactgtactgatgaacatatagagcatttatatctcatttaatacccatgatgactctaagtagcagactctagaattatccctactgtacrgatgaacatatagaggmctaaaaaggataaaaaacttgcctgctgtcacaataagtgctatgtgtcccttacgttagtctgacaataaagactaagccctctgctatcataccacacccctccaccaggtatggtgataggagtgattatctgtatctgaaaagtgcaaaaagggaggaatgcttttgttacattgccaggcaaatgaggatggagatgtgcaagaagaaccacagttagctaacctggactacctgctaaatcccaattaaaacaacatgttaataaaaagagaaagtaaaattaaaaagtcaatagacatccttggtaacattttcatggctatatgttatagatatctgtaaaaaaattaatgagtttgatttttatttgatcatatagcttctacatttctgagccattacactgaggtcttttaattttttttccctgagactaaataaacgtgatggaaactgagatatatttttattaytgagtacgtctgctgttgaagacctgaataaacaaagaacaaaactgaattatggtgctgcagcctaatatcatcacctactaatcaaatatagaaactcttaaaacaaaacatacacatacacacacacgtgcacgcgtgcacacacacacatacacacacgttgaattcccacagctctagctgtctgattcagaaagagagaaakgaagtcatctctgttttcggtacaggcttttgtgtaactgtagagccaagaggcatacagtgataacctttttaacaagcatatatggccattaaaaacagcagggtttcagcctggttatcttgggtatagagataaccacttttgctgactccagggtattcttgaaaacaatacgattgtactgtggagtctgtatttgtttatcctacatgtaattggagcagagctaacatgctattcccgtgctctcttttgtcccatacttttagagacctatatgttacatttctaagtttcataaatatctttagcatagctaatcacmaactagtgtgatatcttttatcattgattttcactgaaaaattgtttattgggcactaggtgcctggtatatgcacttttataagcaaagttaaagggagtattagcctagaaattttacttagcattggtagagattaggagaataaataaaatttatctcactaacaaatacctctgtatgatttctcaggagcgttaacgtcatgaatcctgtggctcaccacttcatgtctgaaggttagtgagccaatgactcatccctcaaggctctggatttgtttacttatttagcaaggtatagcagaaaatgacagcatgcccttaacacaaagcttttcctctagtactcttgtccargaagaggtaataaaatttactttaaaaaactactcagtaactgaatagtttatcaaggcattccattgagaagagaaatctttggggtataaaaaggaaggaaaatgttgtgaagggcatcactccctttttcaatagagaatgtgtgaaaaagtaaggaaacttttttcggttacttttcttcctttcataaatgtctcatgaggcggaaagaatactgcaaggggagatattcttctttatacatttccataaattctactatttgcagtrtattctgtagaaggttcacaaggttttgtcagaagtccaacatgataaaaaatgtacgaagtacatttgtaaatattaatgaagagatgttatcaaaaactacattttgttaatgctttgcatatactgcaaagagaaatagaatttgatgtccagcttcctaaagacacattttaaagactttcagtgagcataggtaattgtgatttattctgaatgcttctaaattctttaagtctggctttcataattgcaagtagaaagttgtattttctaaggagaggatactgaggtgattaggtaattgtcacacatgaacactcatattttaggttaacagatatagtaggctaattctctagggattttctgaatgttaattttacacrcacacacayacagacacaccttgcttttctcccttttactatcatgaatagggataaaacactaactgtcaatttggggtggaatattaagaaaaactaaaacttaaatcacattatgagaaaaattcaccagtaaagtcacctttaatggaggcatacatgcatacatcaacagagacaattaaatactttttctgttgatatattaggaaaatatttattagaagggagcaaagcaaatatataaaaagaaaatatcaagtcaaactatatgagaggaaaggtaaaaaaataatatttgggtaacacatgttaattctttttgttaccatctttagagcagcaatactcaatcagaggcatttttgccycccagtgaacactgagcaatacctagagatagttttggatgctacacttcagagatgccactaaaaagtaatgggaagaggccaggtatgctacttaatatcccacagtgcacaaggcagctcacctcagccaagaattatcctgyccaccaggttaatattgccaaggagaaaccctgctctaggtggtcattgttaacaatgttgaaatcttgattgataacataaaaatattttgtagcacttttcaggtaaataaaaatgggacttgtttactatctcatagaattccttttttgcctgaggaagcatcataatgtcatagtcctagacacttgatttcctacaactggcctgggactgagtctctattattcaaggtgatagcctatcatatttgccgaggttagctctgtatagttctgttttcagtccctcactttcctgtgacaagttttgaccaagatatctaggaaaataaatttaaatcatagactgtttttccaggtgcttctgcccactcccactaggctccagaagattctatttcctgtattctagaaacacccttgagactcacacagaaatctaataatgatcctgtgttataaatttttccaagttctaaatttaaagaccatagaaaaattatctaaatagtttctgctttaatattgtccgtctttacctttaatattttgctttaatattgtccttatctttacctttagtattttggggcatatttatattattttctgtataaaggattttcagatgcaacttcagtgaaatatgagttttgacatccatgtgttatgttcatatgcaattttgtcatctagttaacttttattgttatagttactaaacaaaacaaaaagtgattggcatattagtggcaaagttctgatataaattagaaaattataacagaactgaaggtgatcatcttagaacatcaaggaaaaaattttttcaactttaattttaggaaagcaattctcatttaaagtagtatttcattgatttttttttattttaacaaacataaatttagcaaaataaaaatgttctattttacaatgaaacttttcttactagcaatgttaattcagtaaatatttattgaacatttactattgtcaaggcaattagataaattatttatcctagaaatattttagatatacaattatttttaaataattgaaagctaaataaatatgaagaggatcaaactttatttcacctgcattcattacaatatataaatacacctatacattcctatatctatgtatgttaatatagttaaatataaatattctttacttatttatcctttggatatatgtgtatatttacatccatgtgtatatactttttacaagtaaatgtgcagatgtgtatagagaattttgtattgactcacattttttgataattgactgaataatttcatccatagtataggttttggtgagtgatttgtatctgtaaacactcaaataacaagcaacaaactattttttaaaatcccttatcatattataaatccacatagcttttccaatagtctttttagcaataagagaaaaattacaaagctcaatagagttgtcataacaaaagaggttcataaatttttctttaattacactccgtgttgcctctcatraaagtagcatacagcttctactatcggattgaatgcttaccaatttggaaaatgtttgttgatttttacataaatactttcatttaagaaactaatgatttttataacatttctctttaaagaaataatttataggctgcattggaaagcaaatacattctacagtattttatttgttatcagttccttcatatgtgactacatgaaacaaaatttgtatgctatatttgcagaataaagtagaaaatacattttgcatacctcaaagtaaaaagattcygtaatacaatttctatatgtattccttctctccaaaacatattttattataacatgaacattttagtagttaacatttttatttgtattgaattttgccaattagttagccaattttataattcatttcagtttttgtttatatttaaattacagtttacttaatatttcactaggtatttgtttcataaaagatgattatattagtgaatcacaaggatctgaaggaattcttarcatagttctcatcccaagtagctgataaaatagatgaatttcgtttaatattattccatggtagttcacacatgaactaacacattaaatagtgctttcagcttccacttagtgtaggattgaataaaacatgtgctgaatgaaaacaaatgatgcataggaagtatcaatctctgtgaatatttctctataaattctattgaagtaagtttcaactagggaaactatgatggctttgaaattcgtttttatgtgttgagggtatgcagtacatttactaaaaaaaaatgattatcaagtgataaaatggttgattttggttaaaacaacttctctaacttctctcttcatacatacccacttagctattgccacactagctttgattcttctatatacatgtatgccctagctttagggctctgatctttctgcctggaactatcttccaccagatacttttatgcttagtgtttcacctcctcaagtctttcatggccaaaataagattgtaaatatttatctacattatctatttcccttccttggttaatatttctcattagcacttgttaccatcgaacgtgttcgtgttctatgtatttattctgtttccccatttgaatataaactcaaggaaggcagattttatcctatgtttttcattgctatacccctgcacttggaagacccagctggtcccaaaaagacactcagtaaacaccctatgaatgaaggatatcagatgcttgtaatgcacaaggcccatgtcacttttcgggagtgctacacttgtgttggttttaatccttctgtaagagctggaaaaytagtcctaagaggctgcagcaggcaagcattagctcacaaaaataaggcaaatcaactgaaggaaattggaccaatgagtataaatatcctacaacttcaagtcacattaaatcaaactcccaatagtaaacactccctcacactgcttcccagccttttcatgttgtgctacagatagataatgataatatttaagtagtatattggggtaaactgacaaagctgtggccagaggattctgcctcaggacattccattccaagcatttaatcacacttaaaatctaaaacccttactctgatttactatttatattatctgactcctgattgcctttccagcttcaaaagatggtcttattcttcttgccctcctgcacatgcctcatttctattactgaaacaaattaagtcctgtcttggggtatttgtactagctgtttcctccctctgaaaggcttctccgtcttaccaccattctacttattcgtaattcagatcataacttaaatatgtcctgcttcgaaagactattccttaccattcaatctaaagaagccaatctaaaatagatactctctcccacatcacacagatgtaatgttctgcacaagatttactaacatctaatgtttttcttgtgtattatatatatatatcaatgcatttgtttattctgtgtctctctgggccaagaatctctcacttcctcactgcaagatgggtgtaggaccgagaacagtgctggacacatcataagtgtttagtaaatatttaaagtgggtaaaattaatttccataaataaaaacgtgtattgatattgccaagtgccttagaactttgtcaaaagataaaaatgatttttatataatttcaataaaataaaaacctacagaagcattattatacagtggtttcaggtcagattttggcttaagaaagacctactaactattttctgggacaacttacttaacttgcaaatccttcatttcttcgtatagaaaaaatagggcaggatagctaaggcataggattttcctaagaataaaattaaatactatatatgaaatactatgtgggtggcataggtaggtaagaaaatctcttgaacatgtccctagtgatggagggacactattcagacaggcatctaaaatgattcctttttaaattaatttacctatccattaatccatttaataaaagttgagaaacttctgtttcctggaaagatgctgtatatgagacatagagaaaagaatttgtattaattttcaaaattaggtttcttatggagagaaatatgtaaataagcaattaacagacactttaagaagtgctatgttactggtttatacaaggatttcccaggaagtatgaaggcagaactccatctgatattcttttcttttcttcctcttcttttttttttttttttctttaaaagacagtattttaactctgtcacccaggctggagtgcagtggcctgatcacagttcactgaagctttgaactcctgagctcaagcattcctcctgcatcagccccctgagtagctgtgtagctgggactacaggtgtgtgccaccacaaccagcctttttttttttttttgtagagacaggatctcactatgttgcccaggctggtcttgaattcctgacctcagcaatcttccttccttggcctaccaaagtgctaggattacaggcatgaatcagcagcagatccagcctgatatttctttctttccttttttttttttttttttttttgagacagagtctcgctctgtcacccaggctggagtgcagtggcgcgatctcggctcactgcaacctctgcctcccgggttcaagcaattctctgcctcagcctcccgactacctgggattacaggccccccccaccacgtccagctaatttttttgtttttaatagagatggggtttcaccatcttggccaggctggtcttcaactcttgaccttgtgatctgcctgccttggcctcccaaaatgctgggattacaggcgtgagccaccgtgcctagccccagcctgatatttctaattgaggtgactctaaaaacgaacagcaatttcatggtatataaataatatatacataatttatattataatattattatataatattatataatataacataatatcatatattatatatattatataattatattatatatattatataattatattatataatatattattatttatattatatataatatatattatattgtatatattctatataatatataatatataattatatatataactatataatttcatggtatatgtataatttcatggtgtatatatatatatatatacccacacatacacacacagctaacaaaaggtaagatttggatttttaaactgaaatttcccctgatggagaacgcttgtttatgtcttgttaaatatttaggcaatactcagcctaacagattatcacatattgacataaaatgatgaaaggactagggactctgtcttggctcttaaaaataacatcctaattcaaacttacacctgcagcaagcttgaaaaggcatatttaataaattgaaaaaaatagtgaataatgtgttacagtttgaaggagttacttgagagagcttctaggttagctgggggatcttccaaactccagcacataattaagagcattctattagatgtgtgtggaatcctcttggagatattttgaaaatttatttatgggatgcatcaagttttayttaatgtttaagacctctgaattttctctgaattagaaataatccttctttttttcagaaaactatgatcttatacaatccaaatggtcaagggcaatgtaactaggtcgtgaaacaactgagtttctactataccaactgtgataaagtttataataagtaactagttgtctgctggttttcctgtcttctttttaaattatgcaagaggctaataaaacagtaaagtaatagctctcaggtttcaaactgttgtagttattggctatatcccttgtggtctccctgcatacctcttgggtaaggtttcctctctagggctgtcagccaacatgcctttgcttgagtttatggtaaaacattttttttttttctgcactgacattctggagcaggctgtgtgttttgggtcgagaaggctgcatgcagtccagtgtgatggctgcagcccacttgctaaccttagagacaggtcttgtagtctcgtgtccctcccttgggagataattaggatcagataagctcatgagggtggaattctcgtgaacaggattcatgtccttataagggtccagagtgactgccacatgagaacccagtgaaaagacagccatttatgaagcaaatcctcagcagacactgatcttggacttcccaccctccagaattgtcagaaataaatacttgttgtttaagccacccagactatggtattttgctctagtagcctgagcagattaagacagataccatccttcttctgtctctacttgtgtttagattattagagtataattttcaaaaagttaaaaacaggagtctcatgcaaatttaaaatgaatcttggtcaaagattttatataacaaagtaattaggttaccagtaacacgttaaaatcatttcaaattgcatttgaggaattagatatttataaggaacagagaatgttagaataagattacaggagttatctgttgaacagatgtaaataatttgcatctctgctgtaaattttctataagggaacatctgctcttacagaattataaaacagcctcattaaaaggaagtcagtgcatcctgctgtagcacagtgctccactggaagaacatgcagtattctttgcctatttccaatatctatattatatttctrtaatacgtgtcaataatacgggttaatcattgtgattattctatttcttggccacctactctatgccaggcacttggtcagatgttggaatccatttcatctaatgccaaaaatagctgcccagtaaattcttatataaacaaactgagactcagggaagatacattttccaaagtccaaaccattagtaagtggcacacctgagttttctttgttcttttatttaaaacttactatatatgctatgcactactttaagggatttataagtcttataccatttaatcctaaaaataacttaaagtgccctcactttatttatgagaaaactaggcatcatagaattgaataatgtgccaaagataaatttgacaccattacctgggacttcctaatatatgatcagataaagagacttctgcatcctgtggaagttctgcctcgggttttctttttttttttttcgtttgttttctctgatagcaatttgccttctttgcctatctcagtcaaccttgacctttaatccagcacctctcttcttgcctgtgacctctgaactcttgactctgagtctgtcatttaatacacatgctttgtattctggagcttctttccacgttactgcgtctgcttcaatctaatacccaaatccagaattttaattatgccttttgctttgacattagatttgtctatgtctgtctcttaattgtgctccagcaagacagttcggcaagaatcgcttaaattccatttttcaaagataaggaaatagctttcctttgtaataattggacatttaatgccatgagttagaatggaaagatacctgaaatcgtctttcacagagatagcctgttcacattgttttcattaatcattcatttttttwaaaaaaaggattttacgtaatgcttttatatgcaaaacatcatgaagcatagttcaagaatacagagattaaaaattagacattattctgaaatggattcagccattaagaacattatactcactagaaaaactacacagaaacatgaaatgccttgtttctaacctttgcaccactcctttccccacagtagaaatatttgactcctcacctatgttctggtatcttgtcagtctttactcattgctcctatttattctacccagtctacatcattaggttcaggcttcttacctgaaacctcaactgcacctcaattcctaagccaagttagacagaagtgagaagcagatttatctgatctccaccactctcagcctatccccagctcagayagatttagttgtatcttcttccagtgtcacttctctgtgaactaaatgcctcactgctgaccaatgggctttcattttcggtatgaaagctacacttgccttcacctcagagctcttattctgtttatrgaaccgctgtacctggaatcctgattctcgactccttgctgcattagctggaattatgttcttattcttagctacaagactagattgggtctagaagtttctatgaagttgtgaaatacttatttagcaccttaatatatgttaagacactgctacaagtgtttcacaaatactataaggraggtactatttttatccccatttaatatgtgaggtaaataaaggatagaaaagtgaagtaacacaggcagtttggctcagagttcatgctcataatgactatgcaacctgtctccctaattatatcttgcatttacagctgtgctttcattcccagccactagagcaccagaattgccctaatgttgacaaactcttagattccccattagcacctgctctaaagatgctactttatcctgttctttgtgttatattcccagacctcccaggttaaaattgcttacctgtcatcatgcgttccttatttagagttcactttcccaatagttacacccagatccccttcttttccctatccagcattcatcaaatgtttcttcccagttccagtatagaccttctagcttgcctctttctcctattcataggtaaaatccttaaatatatatgagatagtaactgtagctcaattcaaggaccaaaaatggtcaaccattagatcacctgatccatcttttagcctttaaccttatgaatctgatcttgtaggtacatgtctatacctatattaaatgtatgaataacatatatacatgaaacttagacaaaatagaataatatgttgaaagcaaaagaaaatgtttcatatgaatatttgaatgttaatataaagtttcattcgtaaartactgacaccttaagaatggattagagatcagtgatagattttacaaatttggcttacaaatataatgtttataatgatattattttaattttaagtaagtacatttatattcataaatataaaaatcaaacatatacacttttaattactattcagcatggtagaaaaatattgcaattactaaagactagaatataatattcttaataggcttcaatgtcaatataatatagaattgttttaaacagttcctttttctgatctgaaagttgacaatagattcttgaaattaattaatttggattgacctttttctcatttagcctgatggcaccaacagaaaatgagaaaagattgaatactcagaatgcttagataatcacatttcaggaaaacaaaaacaaaaacaaaaaacattgtttaaagtcccccattgagcactttttctatgttaatgagaattcccatttaattctcataacactttgagaaaatatttatccccatttgagaagaactgagatttagaagttcagtaacttgtctatgataatacatgttaatagtggatccaagaataagactcagatcttgccaactcacagaacattctgtaccattcacatctcctcaaacattatgatgccaatgtaaaaaaaaatctcttagtaaagataagcatactaagatgtaaatgggtatgagaaatggaaaatggcaagattgttgatttcttcattataaaataggaatgatggctttttgcaatatcacagtcaaaaccataaaaaatattttatacttctgtatttaatatactatttaaacatagcaatgaaagaatattattttgactacattagcttaattttaaaaaaggaatattttaatctaaattcaatttgacagtaaaataaaagagtatttgaaattctgaatacttatatgccctgtaaacttgcttctcagaatgtgcttcagtggcccacataggtaatatttttaactgaatataaccatattacatgtggaaaagtttagagcttggtaaaaaatcatttgaaatgtgtaatgttcaagcaagaaatatttagtagggtactgtacattagagatgacagaatatttactaatggcaaaagacaagccatgtcttgggttcttacctttcaccttctagctagtatcacaggcacaacaggattgtttttttctacactgtagccagagtgtgcatgtttttcatacagggctattttaatattcatttattcacttttggataatgaaaaattctactagtcactctaggcaatttatcagcattaatgataatgcagccagagtagcatgaaaggaacaaattagaacatggatttaggtaattatatattgttctagtttagcaaaaaaaaaatcatgttttaaatccgaataccattattctttagtaaaataaatcatattggatttcaatacattgctaattgttcaggtttctttttaaggtagaatagtattttaacaaaatttgttattggatatttatagttgtactgaacagctcttattatatagttccctagattagtctatttaaaggcgtttgaggaaactaagctttcatttaaaaattctgaagcaaatttgatcagtacatctattgaatagcatcttgaatctccgaggatgtgatctaacagaatcccaaaactaggttccttaacagcagagtctatgaattatgaaaattgatgacagatagatctatagatgatagagatgcaaatatggagatatatataaacatatattatgaaatacatatatacattttttttgttatggactgatttgtgtccccaaaattcatatttgaagtcataacccacagtagcttagaatgtgaatacttagagatagggccttagggaagtatttaacattaaattaagtcatttaaatgaaagtacaccctaatccaacatgactggtgtccttgtaagaagacggaaaacatgcaccgagaaaaggccatttgagggcacagtgagaaggcagccatctgcatccattggagaggacagaggcctcaagtgaaaccagacctgctgacaccttgattttagaatcccagcctccataattgtgtgaaaataaatttctcagtttctcacatggcatttaagccacccagtctgtggtattttgttgtggctgcctttagcaaactaacgtattgccttatgatctattgaaaggttcaagtaaaaaaaaataaagaaaatttaatagggcttcaagaagttaggagttgtcaaatattctttttattttcttcttctcttgcttttgttaataaagaatttctggggtagaaaaacaacattttttctcactaatttgtgtgatttccagcagttcattattagaaaccaattattttaatgcaagaagaactcttttttacactatttgtggagagcaaattatataaaattgacatacctccctaaaagtggccttaaaaatgttcatgtatttttactgaattcttcttttagaaattattttaagtaaacaatgcagttgcttaaagttttctgtaaataggtgctgatcacaacatagttcatagaagtgaacaactaaaaataacattgtttccaaattgaagtattcccataaattgtgattttttttgtatctataaatataataacagatatgtatttttaacatggaactgcctggtaatagagaaaataaaaattctttaagagacatgtaataaaaagcagcagttctagaataacacagtaaaggcatctgaaaatctgctattccataaaagcaacaaggataggccaggcgtggtggctcacacttgtaatcccacactttgggaggccaaggcgggcagatcacgaggtcaggagatcgggaccatcctgactaacatggtggaacccgtctctactaaaaatacaaaaaacttagctgggtgtggtggcaggcgcctgttgtctcagctactcgggaggctgatccaggagaatggcatgaayccgggaggcagagcttgcagtgatccgagattgtgccactgcattccagcctgggcgacagagccagagcaagactctgtctccaaaaaaaaamaaaaaaaaaaaagcaacaagaatatgggcaaaaattgtccaaatcaactttttaaattctggaaatccaccaaaggctttcgataccacggagtgtttattaggggtaaatggttgaatctcagttctaacagcaaacattgtgttattttaacttgcccactttctctacctcatgtgcagttgccttgctatccggtgaccttgcaacaaagacatctgtgtaaaagatcacctttgtagccactaagggggccttatctatgtggagctacccccaaaagcctcattcccagagttttatcaatatttgaattgtctaccagctccctagaacagggccatttacaagacttgtttttatttgaactcagggcttactcattgcaaaaagccctatcctatccacaggacatttgacagaaacaatcaattgtttaatatttcagttgcttgaggcagtgatacaagttggggaaaatgagtctgaccaaaatcttaaatggaaaatctgggagatgatatgtctacagaggcctttaaaaaggcttcttataaattctctggaacctagaaagccacaacaagtgcaggggtgtgcccatattcaaggctgtgtgtatgcccaagaaagacctgacaaggccctgttttctcacctctgggtgaccttgagtttctgcataggtaggaaggaaaagctaaggctgactgcaaaccatcagatcgttgaagacatgcccccaatacatacacaaaaccaattggcaaaagccgggagacttattggccaatacattcaagataatctttgtttaattgtaagttgatcactattgtaatccaccagggacttcagtgaactacagatgacaagaataaagacttttcagaatatttcattaaaaaaagatgacaccaaaatcaatgaactgcaacaacaagccatgtgaaagagaagaatctgatttttagagtttctacattatatgaaaatgtccaattgccaaaaaatgtaaaagacgtgagaagacacaagaaagtgtgactcataagagagggaaaaaatagtcaaaagaacctattttatgtatttaagaagtgatggaagccatgtctaaagaactaaacgaaagtgctttttttcctgaataaagaaatcagcaaagagataggaaatatttttaagtaccaaatagaaattctggagttgaaaagtatagtaactgaaatgaaagtaccttcrtggactcaacagtatatttgagcaggcaaataaataatcagttaaatttaagatagattcatagagattatccaatctgataaagagaaaaataaaagaatgaataaaaatgaacagagactcagaaacctgtaaaaacgctgtgaagtgtatcaacatacacatgagatttaagaaggagtgaagagaaagtggcagaaagactatttgaagatatgatggccagaattttcttaaatgttatgaaaaacattgatctgcctaagaaacttgaagtccatgtggtataatttaaagagatgcatatttcaacacatagtagttgaactgttgaaagacaaagaaaaaaaaatgtgaagacagcaagagaagagccactcatcacacaaaagtctcctcaaaaagatggctgacttcttatcaaaagcagggaggccagaagaaagtgggatgatatattcartactgaaacaaaggataaaagctgccaatatttcttatccaaccaaactgtctttcaaaaatgaaagagaaattgagatgttcccagataaacaaaaactgcgcgaattcattgctaggaaacctgccttataagaaattttaaagaaagtccttcagactgaaagagaaggacaataaatcgccaattgaatccgtggaagggataaagagcaactgtataactacacaggaaaatatgaaaacttatacatttatttttatttattactcttatctgatatcaaatacaattgcagaaagcaatagttgtaaaactatattgatgtatgttcatgggtcaataggcttaatattgttaagatgataatataatccagattgacctacagattcatcacaattcctatcaaaatcccagctagcttctctgaagaaattgacaagttgatcctaaatttcacatggaaatacaaagtacataaaatatccaaaacaatcttgaaaatgaaaaacaaaattggataacctacacttttcaatttcaaaatttattatgaagctaaaataatcaagggagtgtggtactggcataaggtcagagagattgataaattaaatagaattgagaatccaaaactaaaccctaatatttatgaccaattgattttcaacaagtgtgccaatacatctcaatggtaaaaggaaagtcattttgggctgggtgtggtggctcatgcttgtaatcacagccctttgggaggccgaggtgggaagatcagctgaggtgaggaattcgagaccagcctggccaaaatgatgaaaccctatctccattaaaaatacaaaaaattagctgggcgtggtggagtgcacctatggtcccagctacccgggaggctgaggcaggagaatcgcttgaacccaagaggtgcaggttgcagtgagctgagatcacagcaattcactccagcctgggcgacagagcaagactttgtctcaaagaaaaaaaaaagtattttcaacccatggtgctgggacaacaatatatccacaagcaaaagaaagaagttggacacctacctcacaacatatacaaaaataacttaaactggattatagacctaaatgtaatagctaatactacaaaatttttataaaaaaataaatgagtaaatccaataatggttagtgatggtttcttagatacaacacctaaagcacaataaacaactataacaatataaattggatttcaacaaaattaagaatttgttcttcgagttgatgccagcaagatgataaaatagaagttttcagcccttattccaccctaagaaacatattttttcacaatctcccatggacaaaagcactgttatgagaacctgggagtccactggaaaagtgccagcagcccaatgggataaataatccaaaaatagacacactgaaaaaagtaagaagaacagttttactttatcagcatcaccccttttcccaaggcagtaaagctcagtgccaagagagaccctcttaatccatgatttctctaacggagaaaactgaaagcrtagtgaattcctaccttccttaatcatgtggaatgctgtctaagaggcatgccccttccaaacctcacagataacatgagaacagtaggtgtaagtatcctgcagatatttaagagtagaaaaaagaaagataggctcacagacaccagagaacagaacttaaaataatatgttaaaatattaacataaaataataataataataataaaagaaccaaaatagtatgtcgaaagaactttaaaaaagagccaagaactccaccaaaaggttcacttatgaagcttgtgatatgcatcccttgcagatttcctcaactaacccacacatgcccccagcattcatcccttccttagcaggtgctccatgtgtgcccccacagatagcacatgcaaacctctgaagactgtactgtagcacatatagtcaccttgacagactgctggactgggagaaagcacagaacctaagcacttcagagcaaactgccctagggagaaaataaacaggggactctcagcacccaacatggctttgtagaattgagagaagacatacaatacttaaacttttcctcaagagggaacaggaggagtggaacaggtacatccatagaaaaggtctgggagaccccaagaatccatatccaggctgattggtgaaggtatttctctccagagatgataaattctacaggaagttacatcttcaccaaatgaaaagactgtaatgaaagactgcattgaacacaaaaactcaaggaaacataacactatgacagaacataatagttttccactaaccaacctgaaaatattagagatctatgaaatatctaaaaaaaaatcaaaataattgttttaaggaagctcaagatgctacagaaacacagaaaaatgaacaaaaagaagaaaaacaatatatgaacaaaatgtaaagttcaacaaagagacagaaattatttaaaaaaacaaatacaggactgaagacaataaatggaataaaaattgaaatagtctttcatgagcagactcaagcagaagaaagcatctgtgaatgtaaagacaggtcatttgaaatcatccagtcagaggatataaaaaaagaacacaaaagagttaagtaagccagtgagatctatgggacacaattaaatgaaacagtatacacattatgtaagtgtctgaagataacaaaaggaaaagagagcttatttaaagatataataactgaaaatgtgccaaatcttgagagggatatgaacatccacgttcatgaagttaaaagatttctaaaacagaataacttcaaaaagaatataccaagacacacgataaaaatattatgaaaagtaaaggacaaagaaagaattttgaaaatagcaagacaaaagccacttgttataagcaaggaaaccccattaagctattagatgatttctcagcagaaagcttccagtctaggagagtgagataatatattcaaaattctgaaagaaaaagactgccaaccaagatactacacccacaaaaactgtccttaagaaataaagaagagataaacactttcccagatgaacaaaatgacaatctataaaatgtctaacaaaaatttagagggaatttattaacattagacatgccttaaaaaatggtaaagggagttcttcaagatgaagcaaaatatgctgtttggtaagaggaacatatgaaagcrtaaaactcactggcaaaggtaaatatatagttaatgtcataattatctgatgcagcagtggtagtgtgtaaactacttgtaattctaatctaaaggtaaaagacaaaagtgtttaaaatgattagaatgaaaataatatgttgaaagttatacaatataaaaagaagaacctctagcagatacacataagaaataaaaaaaacctctagtaaatatacatagataaagataaagaaatcaaattataccaccgcaaaaaaaaaatcataaaattacaaaggaatatgacaagagaagaagaaagaaacaaagaaactgcaaaatgttcagaacaacaagatggtaattttccaaatctagtcattacctatataattattgaaaatataaatggattaagctttccagtaaaaatagatagagtgggtgaatggattaaaacacacgatcaaacagtgtgcttcctacaagagacttgctttagctttaacaacagacatagacaggaaatgaaggaatacaaaaaatatgccatgmaaatggtaaccaaaagacagtaagggtgagtataattatattagacaaaacgaacatcaagtgagaaattgtcacaaaaaaccaagaatgtcattatataatgagaaaaggtcatttcattargtggatatagcaagtgaaaaaaatatatgcatctaacatacagcacccaaatatataaagcaaacattaacaaaactgaaagaagaaatagacagaaatacaatagtagaagatagatactatgttatcaacattgaatatatcatctctatagaaaattaaataaggaaacaacagacatgaataacattatagaccacatgggctcgacagacattttatccaacagcagcagaatgcacatttttctcaagcacacctatgacatctttcaagatagattatatgtttagtcataaaacaagtcttaacaaatttaacaaggctgaaatcatagaattatttctgaccacaatggtattaaactagaaatcaataagaggaagaaaaatcacaaaatttaaaatgtgtggaaattaaacacactcctaaataatgagttgaatctaaagggaaataacttgagagaaaggaaaatagtaacactacataccaacatttaggacatgaatacagtgaaaaaaaattactaaaagaaattttatatcaataaatgcccatgttaagagaaaaagccctcaaataaaccacctaactatatacctcaaagaattagaaaaagaagaacaaactaagctcaaagttagcagaaggaaggaaatagtaaatattacagcagaagtaaagtagaggctagaaaaataataaaaaagatcaacaaaatggtatttgttctcatactatgataaagacatacttgagaccgcattatttatggggaaaagaagtttaattgactcacagttccacaggctgtacaggaggcatggctagggaggcctcaggaaacttagaatcatggtggaaggtgaagaggaagcatgcaccatcttcacatggcagagcaggagagagagagcaaagttggaagtgctacacacttttaaacaaccagatctcttgagaactcactcactatcacaagaatagcaagggagaaatccacccccatggtccaatcatcttccaccaagcccctcttccaaccttggggattacaattgaacatgagatttgggtggggaaagaaaagcaaaccatatcagagattgaatcaataatccaaagcctttcagcaaagaaaagcctgcaaccagatggttttactagtgaattccacaaacatttaaaaaataataaatgccaatacttttcaagctcctccaaaaaaattgaaaaggacagtatgcttcaaaactcatattacaaggcccaaattaccctgaatatcaaaccttacaagtattctacgagaaaagacaaccacaggcaaatatccctgatgaacatagatgtaaaagtcctttccaaaataacagaatacagtacatgaaaggattacactccatggtaaagtgggatttaaccrtgggatgtaaggatgattcaatatatcaaaaataatgtcatacaacacatgaacagaatgaagaataaaaacatataatctcaataaatgcagaaaaagaaattgatgaaattcaacaccttctcatgataaatactatcaatatattggataaagaaagaatgtacctcaacataacaaaggctgtatgtgaaacacccacagaaaacattaaacagtgaaaagctctatgcttttcctctaagatcagcaacaagacaaaggtttctactcttaccacttctattcaacataatgctgtatgtcctatccagagcaattaaacaagaaaaagaaagaaagacaaccaaattaggaagaagaaaaattgtctctgtttgcagatcacatgatattatatgaagaaaaccctaaagatgccacccaaaactattagaactaatwaataaattcaataaagtaacaggatataaaatcaacattaaaaatcaatattatacatatatcaaattactttgttgtacaccttaagtttatacaatttttatacattaacaattagatatccaaaatgaaattaagacagcaacaccatttaaaatatcataagaaataaaaaaaacttaagaataaatttaaccaacaaagtgaaagatctgtgcacttgaaactataaaacrctgatgaaagaaattgaagatgacataaataaatgaagatatcccatgttaatggattggaaaaaataatattcttaaaatacctgtagtacacaaggtgataaaattcaactcattctttaccaaaatctcttattttttgcagaaacagaaaaaaaattctgaaattcatatggaatcataacaggtacagaatacccaaagcaatcttgagtaagaagaaagctggaggcatcacaattcctgatctcaaaatatattattaaaataaagtaatcaaaactgtatagtactgtggaaacagatgtgtaaaagaatgtaacagaatagagagtgcagaggtaattctccacatttgtagtcaactgatctttgacaaaagtcccaaaagcatacaatggggggacgaaggaatagtctcttcaataaataatgttgagagaactggatatccatatgtagaagaaagaaactggaccattatctcacactatatataaaagtcaactcaaagtggattaaatacttagacataatacctgaaactataaaactgctagaagaaatatagaggaatgctgcttgacatttggctgggcaatgattttgggacatgacccctaaagtacagacaataaaaacagaaatagacaagtaggttttttcatcacagcaaaaagtttgtgtactagcaaagaaaacaatcaacaaagtaaaataacagcctaaggaatgggaagaagaaaatgtttgcaagctatccatcccataaggggtgaatatctacaatatatgatactcaagtaattcaatagaagaaaacaaataacctgattaaaaattgggcaaaaggctcagtcatttctccaaataagatgtatgaaaggccaactgttatatgaaaaggtgctcaacatcactaatcaccaggaaaatacaatcataagyacaatgagttatcacttaacacatgttaagataactgctgtcaaaatgacaaaacatgacaggtgttgaagaagttgtagagaaaaagcaacccttgtacagttggtgggaatgtaagttgttactgccattatgaaaaacagtatggagattcctccaaaagttagactagaactatcaaataaaccagcaatcttacttctgggtatatatccaaaggaaaggaaataagtacgtcaaagagatatctgcatttccatattcattgcagcattattagcaataaccaaagcatggaaacaacgtaaatatctgcccgtggatgaatggataaagaaactgtgagatacagaaacagacaaacgcatacatacacacaccaacacacacacactccagtggaatatcattcagtcataaaaaagaagaaaatcctgtcattgtaacaacatgaatgaacgagaatgtgttcctggtccattcatgctaagtgaagtaagccagacacagaaagataaatactgcatgatctcactcatatggaaaatctaaaaatcacgatctcataaaagcagaaagtagaatggtggttttcaggggctgggatacgtaggaaatgatgaggcatttgaataaacggtagaaagctttagttatgcaggataaatcagttctagagatgtaatttgcagcaatgtgacaagatttaacaatactgtattgtatacttgatatttgctaacagtagattttaagtgttctcaatatctacaaaaaagtatgtggggtgatgtatatgttaattgtcttgattgtggtaacaatttcacaatacatatatcaaaacattacattgtatacatatctcaaaacattacattgtatacatatctcaaaacattacattgtatacatatctcaaaacattacattataaactaaaattatgcaatttttattttttcaattacaactcaataaagctgggagaattgtgcttgaaaaaaaagaaaaaggctttcaagaaagtgaaaatacagcctccagaatggaagaacatatttgtaaatcatgtgtttgataaaagactcatattcaaaatacataaaacatatttttctctaaataagatacacaaattgccgataaatgcatgacaagagtctcagcacctttacccattaggggtatgcaagtcagaaccacagtgaaatacttcataaccataggatagttaaaataataataataaaaaaagataggcaagtacaacttttggcaggtatgtggagaaatccctcctacttcaytgatatgattatataatagtatagtcactttagaaaacagtaagatgctttcttaatctattaaacatagaattaccaaatgacctaccagttccacacttcagtgtatacccaatatataaaaacttatgttcacacaaaaacttgtattcaaatgtacatagcagcattattagtagccaaatgtggaaataatacaaaatatacatgaactgatgaatccataaagcaaagtgttatatccacatgatggaatattattcagccttaacatgtagtgaaatactgatctattttacaatatagatctaccttggaaaatatatgtttagtaaaagaagctcatcacaaaacatcacttattgtatgattcaatttatatgaaatgttcagaataggcaaatttatggagacagaaagtatatttgcatttatcaggggttaagagaagggagagtaggaaatgagtgctgatgggtattgggtttatttttcagatgaggaaaatttcttagaattagatagcggttatgttgaacaattctgcaaatatactaaggaaacacagaattgtataatttgaaattgagatatatggatatgttaatttgcttgtctatgctaaccattttactatctattgtacataaaaacttcatattgtgcaccttaaatatatacaataatttttttctaaataataaaagaatgaaagaactgaaagagtgaattttatggtatgtgatttatatctcagtaaagctgttataaaagaaacagatacctaatgagtaatgaaactgtcaaacacggaaacagagtctctaagtaatttgctcactagttactgcaacttctctctgccaggccattatattattagtagtagtatggttatcattgtcattgttatttttgttgctaaacagatgaaaatccagttactatgtaaggatattgcaacatcacattattaccaatgtgtttttaccttattagcaatgtgtttgtttaaaacaaagagatatcctatgtatatttgtaacaatatttgaaagtaacccattttttctaatacaaaatactcattatattaattattataaattagaatgatgttatttattgttattatattcccaaagctctagaatgttaaatgatgaaaagagacctttactgggaatttagagtgggtaacatgtctaaatctaattttgccttttattaattgtgtgaccttaacttctcatttaactccctttgtactggtgacttcattttaaaaagtcagaggtttatctccgaaattggttcagtttgctctaatttttattttttgtgttacaagcataattagtatagaaaagccaattaacctaaggaaactatttgccacagattttgataggcagaattaagatttttaatttacattaaaaggctagacacattattaagaaaagtattgtgaatcaaattaactaataagaaaagggaatgattgtataatttacaaaaaacaaaatcaaaatacaactcatgaagaaacagggaaagtggaaaaatgttcacttaccaaaatgcaaataaaataagatttcttttttgtatgtaaaattttaaaagctttataattatatctaatttagttatagatcaaatgacatattttgctgttataaagtaagtagcaataattttaggtcaagcagtttggyggtaagaattaagattaaaaaaaatagtcacagccttcaacccagtaatcctatttctggaaatccaccttaaaatataaaccaagattgtgtaaatattttaagattaaaatgataattgtaacattatttataatactgaaagtctaaaactaatccacaggatcaacaataaatgagtatttaaataaagtatgttgtagttatactgtaaataaataaaaatgaaggaaatgttgccaaagaaaatatttctggagacttcatactactaaattatcagcaagtgtaggtgaccaaaatatggataattattttatccataatattttacaaagttttccagttttccatgactattcctctgtggtacacacagaaaatttcccatccaaaaccgtttgccatttcttctctactagcaaaatttcgaacttctttttagacaagcattattctcagcattcattcagcagcctttgaaagtgaaggtgacatgagacacagctgtgcttaataaaaatataaatagaaaaaattgagtgaagcttccaaaaaatttgtttaaaatgctttagtttttattggtaccaaccttttgttctctgcctctccttcttcatatttggaataaaaatacaatgctggaggtaaaacaaccaacttgtgacaacgagaacacaatataaactaaagcttcatgctaagcaagacttcgcagaaagacagagggcaccaggattcttgatatcactttggagattgttccagccctggccacctacctccagccttcttaagaaacaaaactaaattcctaacttgtttaagccattgactaattatgcattctgatacttgaggctaaaagcaatctttgacatatacatacgtatatatatatgtatatatacacacacatatgtgtttctattacatatataaatgcatatattataattatatgtgcttgaattggtggggttgtaattttctacataatttcaaattgcatatactggcattataaattgaacatgtatatttgcaattatgtatgtatatatacacagacatcatatatgtgaatgaataggagtacactagacagttaatttcctattcattcttccatatttagctcaaaggaactttctctgtgaagcatcttcattttgctttcttataatttgaatgaacctctaatacaacatacataatcttatattgtaatcatttgtttgtatatctgccttcccactcccactcatttcattgtcagttcttgttgggctgggatatcgactccatcatcatttacacatttaatagatgacaatagattagctcataagcaaacattgtaatgattcacttagatattattttcattttgatggtatctgtttaattctataatattctcaattccttttcaatgccctatgtgctatgatgtatgcaacaggcattcaatgatgtcattaattaactgataacagttgcaatacatgtatattaggggtttctgatatcctgcaaattacatctaatacaggaaacatttggctggatattcgttgatctacagtctagattcaaaatacgagtggatattttcaaatattttcatataatgctttttcagggactgaactaacagcaaatgacctagcacacagattccacaaccaaactgtgtggggacagaccaagttactaccttgatatattcaaatgcgtcacttaatcatttatattttgtgttcctcaatggtaaaaagaggataataatatttttattgggttttgtgagaattcaaagaattaatgtacacaaagctcttagaacaatgttgaatgtatggaaagcactcaataatactttctataaacaatggtttgcagtagggatgcataattagatcctaatctgccactttaaaaatacctctcaagagtctgtctttccaaaatgtctattattttcttttcttcttcattgcttcattaaatctgcagttaattaatgtatttatgttacaataatctaatttagattcagggaatgtgttgaatgtcctcacatagcttctcaatatgaaaataataaataattctgtagactgaataaaaatgaatcagagtgagattgaaattgcaatctcaaaattagattttgtgatgagggatctgtagaccgtaattcaatctttctctttgcttcagttaggttagatgatgttccttggaaaatgtgaagtttatatgttttgtatgcatggtttgtgaagaagtcattgatgggaattgtttatgtgatagtctttagaaagcttgtgtgatgaagctcagctcctataaaatttcacttcaaaaacagccctttgaataccagtttcccattttggagataatcttttattgtcacaaaatatgtatttaaatattatgaaaactaaaaacaaggtaaagtgtctccctaagtacaataaatattgaatagaattataaatttattctagaagagggaaaatgcaaacaactacttccaagcaccctaaaacaaaacagcaattcctttcatagttctaagttatactttctgatgtgaaatgagtaattatgcactgctttattttaatatatgtatataaacataaatatatacttttaattatatttaaggtgtgtatatatgtatgtatacaaaacattttaaatattttttaaagcaaagccaattagatactaatacagtcatcacattacctaaacatttatttattcattcattcagtcattcatcaaagatatgatgaatatctttgatattgtagacttatcatgtattgagaatggctttagggatctgaatataagagataagttcctatactcatggaacttataaaatattttatattttaaatgttatatatttacctgtatttctggatagatgttatgaaaaatgtctttaaatttgtttatatggtgtgtggcttattcaacctgcccatttattttttcgttatgcaagtacgcactgatgatctaatatgarctaaggacttctggtagttattaaggctgttcccaagggcacttgagagaattacacttctccatctgccgccatatgactactttctttagccagtgaaatgtgagtaggagtcttaacttgtgtcacttctgatagatttaaatatcaaagtgattgtggaaggcatggccattggagcctctatttgtctggtgattaatcgaccgcgatgaatagagctccatttcacgtttacattggctgtgtagacggagatgaaagatactctccctgtgttaagccataaaacatcagagttattttgttaatgaggcataacctagcatatgcttactgatatagcaccattgtaggtgctgaggatataattttaagcaaagcagataaagtacctgcccacatggaatttatgttcaagtgatgaaactataactaaaaaaaaataataaactgatacaggatatgatgatgaatagcactaaatgctataaagtttagtaaggagataaataatcagggtggatgctattttggatagaatgctcaggagagtaatttctggaaaggtgatacttcatcagagaccttacttaaagggcaagacccttaggagctgcactagcaacagtgttgcaaaaggcctggcacacaggttccaaaaatgcaagctatgtagtcctgagctcaccagttaggagctccagcaaataatctggagaaattatggggaaatatgatagctctgaggcaagagagtgtgccctgtgaacagcacagagcccartgtgtctgcagtggactgagcaagggggagacctgtaggagataagtcatctaaggtcgtgtgagtacacagaacaagtgatgcctcatagaccttcatgaaagtaaggtagagaagaaagttttgaacacaggcattatgtgatttgacttatgatttttaataatcactttgaattcttgatgaacaataaactctagaaggtaaagagtagaaactggcagactagttaggatgatattgcagtattgggttgttgtaatagcgatgatactaagtgtagactgagctaacaggatttgctcttattttgtaatggtgagatgaagggagtgtggcaggggccagaggagaggagagagagggaaagtagggatagattagagagaaggcatggaaagacgtactckaaggaaggaatgccacgatgaaggcctggaccacatagaatgagaagtcagatcccattttgaattccagagcagattttgcccccaggctatattaagaggtgaatactcgaactaccacagttactctttcattataatgaatgttatctagaatttccggtagcgcatgctattggtgccctgcccatagtccttgattaattatcatttctatgcttgtgggtgcaaattgcagtcagctatcacctttgccaggagggctctacaggtagacctgaagtagaagggcattaactctctctagggaaagccctcaaacaattacagaagttggtggataaatattcatctccctacccccttgggcagaccctaagctgtgagttctgcaatgatacttagagtttcccagtggggttaggcttcaattgtccagattgctaacatatttgacaatgcaaactttatttcttttcttcccctttccactatgaaaaagtttagatatttcctagtatcagctcctaactaaactatttgtactcaaatctgtttctcaggatctgcttctaaggaaacccaaataaagacagtttatacacggatgaaaatttattgaagttgaatattatctaaagtaaaaccaaaggttttccattctgaaagtgaatcaaaatctgttgatggttcatagatacaatattgcaaagataattacrtttaatccccaaagcaaccatatgatgtttttagggggagcttcttgaaaatgaagtagctatttaaatataagtttaaacatcacaagggaaaggatctgtttgatttactcatgaactccaaagacctggaggagtccctgtcacatacaggcactcagtgagtatttcaaagaatacttaaactaaaaatagttcacatccatcttggaagaatgtttttgatggggaacccaagttcaagaggataactacgtgagctctgaaggagaaaggaactttcaagcaaaggagagacatcaagtgaagcagtaatagcaattaggatagcttatatgaggtctcctcaatggtgtggttgctataaacatttttataggtgccttacctaaggctaagagaagtaaagcatttttttcttagtcccaaaactgatgcatgagagtagctacatttgagctcaggcttgtctccatcttcctgcacccttgcataatctcgaattcttcctgctgactggcctaagttaggcagttagattttggagaatggatgtaagtccaaatatttcttaaagcaaagactttttaaataaaatgaatgccatagtcagttcaggctgctatattaaaatatcataaactgggtggcttaacaaacgtttcttacagttttaaaatctgagacattcaagatcaagatgctggcagactggtatctggtgagggctcttttcctggtttgcagatggctaccttcttgctgtaacatcacatgacagaaagagtgagctctgacatcttcctcttctttgaatggcagtaatttcatcacggaggctccaccytcatgacttcacgtaaacctcattacttcccaaaggccccacctctaaatattgttacattggggtgtagggtttccacatatgaatttgaatggagggaacacaaatactcagtccatagcaatatgcataaattagcaggattttttcaaacttacttctcacttgtaatttgcaattttaaccaaggtttaatctaggaccagaatgggaaagatattatatagaatgctagatgagatccaatagggtgagggcaaaggaaaggctgctatttattattctatatttcaacaagtaaatgatagcatctaaacaaaaaaaaattcctgcaaaatgtcataaattaccacacactaatatcaaagtgcctaaaataaacaaactcctatcatgaaggraagtaaaattcaactaacaggtgttcccacaaaggagaaaataaggtcattcctttgaacctaggtggctgaaaagagtgagaaaagatattctctaataagacttctataataggttcctgaggcttgacagcctaaagccaaaacaaaacaaagaaaaaaaagatagagtccttagaagcagaccagtgaacccatactcacttgcaccttcaggccaagaacacgattgatagttatagtagtayatctaagtgcatttcctcaggtttccatgacctcaatccatctccctctccttagaccttctcatttaccagtcagcagcatgacttacgctatgcatattcattctaccctgcctccagcacagagactcaaacacattctttcatgaatcactatcacaaccttttaacagtttggagtatattaaaataaaagcaattccatttgaatcccatttttttttgtccttggataaatgtaatcaataattaagttgtcagctttttgtagagaatagacatctcatgttgtttttaatgattattcatttacacataattctttgcttgcctaaaaaatatttctactacctcaaattcccagtctaatttaatttttttctctttatgtactaaacatttttgaaatcagcaactctgttattttgtcaaatttactgtaaataatttgggtagagaactggatatgtgacctccagggcatcttcagtcactgaaaatctgtgatcctcttcctaaatctttcgtggactctctccagatgtttgtattactagaaatacctgagagtcctgttttaacagtgtttattaataatatagagccttaaasaacctcataaagcaagattttggtgttttcaagcaagactaacaatccaaattaaggaaaaaaataacttacaaatatcaaaaaacaaaacaaaaagcaccraagggaagggagtagaaattatgcatttgggctattagacatccttttctcacacacttagtctgtaatatgttacctaataaaatttaacactcaggcatttttctagtgagaatatttcatctttctgtgcactattcttttcctktagtggaatatctattatactcatttgcctgtatgccatgcagtttggcacataatcacacactgtttatacgattctctaaatgcttgtctccttgagagattacaagtaattcaattcactaaagtactgtttctctctttttgtatcagcaacagtattgaagtaaacattatgatacttctcagtataagtgacagtcctgggcacaatgccttcctcataataaattccattattggttggattaatgctcaaatgaataagtacttgctgaattgaagtaagatgaaatgcatactggacaagaatgactgttggtagcaaccactgaaacaatttttgttgtctaagctgttcacacaccatttgtccttaaaggtgcgttgttgagaaagtgcaatgtaccgagtactgtgttaacaacttatataatctaactttatcctcacaataaccttaaagaaaaacagagtcataattacttcattttcaagtaatagagaacttggattggcttaaataacaaatggtataacttgattctagttgcaagtaggcaaggatctgtctcttggctgtacgttagccaagcaggatcctggtaatggctgccagtagctttcgtgtctcccctcttggttgcaagatggctataattacaaagaagacaacttcacaccttgaaagcatgggaaatgcaggggagtttgtttgggagagtctaaacaagtgtctcttagttgagttagccccccatgcctggatcaataactaacttattgacttaagctaatcaggatctcttttaatggagtggtgtcaaattagcactaagagggggaaaaattgaaagaaatactaagcactagttattaaagagtgtggaaatgtgcactagaatgcaaaagtaaaataaaactattatatccattgcatctcttttaaagataaacattgacactctttctacagtcagacttagtatcttagtctgtacacagtcagacttagtatcttagtgaattattctttatttcattatgtcgtttaccaaaatatccctattgatgtgttttgtcttaaattccactgtctgacttatttccagacactgcccccaacttccatctcccttggctaagtgaagctgaaggctctggccagcaggaaaggcgaaggcagaataattgcctgacaggttttggattggaaaggaactggggagggaatggaggaggtagctttcaacctctctctgtcgttttattttaggtgtatatctggtgagtaatataacaccaaaaaattattttaaatataatttcataaattatctgttaataagtgagtttytgtttgtattttttgtaattgtaattaattatatttggacagatctacatcttattttgtgttgtttcttgcctcttttctctgcctctttttattcttctttcttacctctgttgaagtgataggcttttattccttatttttacctttactgtttagaaagccatcagattttttttttcttctttagcggttactcttaaatatttaataaaatatttggctaactttttaagataagaaaacaaaactgtaaagggctaatgttactttcttaaaatcacacagttaatattggcaaaagtgaaattccaaattaagtctgtcttcaacaccaatataataatgcctcccttaaatatttgttcattgtcttcagctctgttatctgccatacaataggtgcttctaatttttttattttggcaatgaaagagattcctgtgtactctcagtattagtaatacatacattttctttttattatacgtcatctgaatggcatgtctctttgctgccattcatttctatttaactgataaaattttaattcgctggctaattttctccctgcaactaatgaccgcccacttgtattttaggaatgtgttaattgaagaaaaaaagaaaagaaacagaatgacttgttcaattaataagtgacaaaatactgttaggagccatatttttgacagcaaaaatattagaccagttaactaatacattcagtgtaggatttgttttttattcagtaacttttgtgattagacataatgctagttaataacattaagtaaatcagttagtacattttgggtgaatattatttttgcattctgagaacccataaatgaaaaacagtttactaggagtttagctgaacatataaaatgaattgattaaacatgtaaagaaagtcataaaacttcatcagtttgattttcggcatgttaagtatatcttaatctggtaaatcaaagtatgtgcaccactgttccaaggagaaattttgaattaatttttggtaactttttggagtcctgctttctgtctttttctcttaacttatactggaagaaaactgtttcactgatgtttcatattcaaaactagcttgactagttttaaccttgatgtttttaatacacactaatattcgtgaatatttctatttgagtagaagtgaagattcatatgaggtagtctgaaagtttgaatgtcctcaattttataaatgaatttaaaacacctgattatttctgaaacaaaaattgctaaagaaaaaatagagtgtatatatgaacctgtatttaaatatttgatatgcctggatcagttagagagatctctaaatcaaagaagctggccaagccaagtgaattggagaggaaaatactgagatcatcagaattagagagtagaggctagttagacaccaaaccacatgcaataaccctcagaataaaatctgaggaactgtgtcaatcatcaagtttgagttggtcttgggtaaaaaaatggcagtagaaacactagcaactttttgacatgagaaggtagttaaatttaagtttcaagggaaaaaccataaatcattggcatgattatatttacaatttcgatattattacagaatatttgctaaactccccataacaacgccttcggagaccctgtgtatcatgcaaaggtagatttagtcaacttgctaaataagggagagcacctgcttaagagagagagaatgagggaagagtcatgtagggtttatggacctcgggttagacacgtactgtacaaggcagatggtcataagtgaagtctagggagggattgatcagaatttgtaaattaggtcagttgccagaactgtccatgagcccatgcaatcaatgaattgaactgctaaatcagcttgtgattttatctagaaaaatacacatgtgaacaaactggtgctaaaagaatttaagcttagtttgtctgtcaggatatggtctttacagttcatctgtttttcaagtcaagtagaatttgtggtttgtgtttcatttcgtatctagtattcagaacagtgtcttcccttttttatttactctttacccatagcccttccatggcattttgactgggtcttgtagtttcatgtgactattttacaattcaccaaaaaataaaactaaaccattatattgcttatgacatttgcctagtgactcttttgtcctgttctagacttgcattctcctgtagatcttaattctaagcatcctttctctctggttcaaaacaaatctttctggaatataacttccctcagtgttttgagattttcaaatgttgcccagtttcttaaatatatgctacttgtaccaaggcacccattcatattcaggactgttaaattgctagataatttaggaggaaaaaaaatgaatttttattactttttaattcaacttgtgttttttcttgtataaaattaccatgatttttgtttttatctttagcattagacttaaaaatgtgttgtacacaggtcatagcagcttgctttggacttgtgccatagatctctgaggatgcaaactcattcacctctactgttcattgtacccagaggaaaagcttaataagtactgctgtaacaaaatcatattattaaatagagtaaaatttattgacataaaccctataaggtttaatatcccctaatgtttgaaatattcaggttttataattttcacagatctagccaatattttattagaaattatgagaaagaggatatgctgcataaagtcagaactaaaatccgcaatattgtaagttggagtaaagaatgataaactaccaggcatggtggctcatgcctgtaatctcaacactttgggaggctgaaggaggagaatcacttgggcctaggattttgagaccagcctgggtaacataatgagacaccatctctacaaaaactaaaaatgaaaattaaaaaattaaaaattattcaggtatagtggtatatgttgtagtcccagttacttgggagactgaggcaggaggatcccttgagccaggaaggtcaagactgcagttaaccatgattgcagcactacactctagcctgggagacagagtgatatcttgtctcaaaaaaaaaaaaaaaaaaaaaaaaaaaaagaaagaaaagaacaagcttaaatatcctggtcttgacattttttttggttcatataacataatgttgatttttttgttcttaycctaccaatttaacttgctcaatagtcatatctttgtaaaatgtcagcaggaaattttgattccattaaatcaagccaattattgctggtgctaatcatcatgtttttatctgataagataaaataacaaagtgatgtttctaaaatttatgtgtctgtgttatgggaggggttccactaatatttacatttaatttttgccttttagaaatgaaaactataaatacttataatgacataatagacttgatggctgatttgtttcattttcattattgaaactctcacatatttgtatttgttactgatattttcactacttattttaagctttgataatacatggaaaattagaagccattacaataagtaaacaatgagattctccagcaagatttggcacacataagtggtctgttttgtggggttttttattttatgtcattgtttttattttactttccctttttgaaagtaaactaatcaacagacttggctagacacagcatctccaagttggaaaatgaagtattgaacactgggataagctacagaatatatattctatacattcaccaagaattccatttagcaatccatgacatgggaacataaaagtttcatacagtttgctaaggctttgataaattttatgttgaatattttgaggcagatcctgaaattctgaggatattgaaccacctttacagccaagagacatttccctttggcttcaggagagattttacaccttgtaacagagaagaatcatggagcctgcgtgtttgggcctttcagtctcctcttaaacattacagcaaaaataaacctaagacttgctattatggaacagcttgagttgctgggaaatataatcagtgtagatatttgtgtatcattgtttaccatttctatgccctttatctgagttaatgaaacacatctggggtatacgttttgaaggaaaatgaaaaagatctgcttatcctcacttaaaatacattctgttcatctccacccagagcattagaaaaaataggtaaagtaagctatctgagatagcttctgagaataatggtttcattttaaatgggagaatgcctgaagggatttctactgtaagggtaaagaaaagactgacatgcagaaataatgtctacagtaagatgagtgaccttccttttgaaaggtggaaggaagaatgcctagaaatgtcagatgcataagactaaaaatggagatgtttcccattctgaaatttatttttgatctttgggttagagctccagatagtattgcaaaagctccctgagtgactctaatctttagcagtgttgaaaaccactaaaaaaaagcaagtcttatatttgacagaaaacagggagatagaattagagagagagaaagaaagaaaggaagagaggaagagagatgggagcagggacgatccggaaatatatagagcattaatatcagaaattatatggttctagcacttagttattgtttcttctgggctcttagtgacctagggtacccagaagatgtctggtccatgagatttttacaaccagatgcgaccttgaaatgtaaatggactttaagagattgtgtgacattatgaagtgggtccttatttgccacataatgcctattgcatgttaaatgctttaattatttatttgtttaaattaagcaactctcaacaatatagttcaaagagtgctttcaagtggagagtagagcataatatctcccaagtttctgggagactgtttcagctacaagatatacgaatgtcaccctatcaaaggcctgaactctgtatccccttaggcctcaatggtatgaattctactcactggggcaaaatgtaccatatagtaaagccatgttcttcttaaaatacgatgtacataaccaaacacagtattttgtgctcaattttgccattgcagaggatagacacttatcttccttgatctggatattatagttcttaackctgacagctcttaatgctgccaaagtttcatcagcactctggctgctttatcagacyctgcttatcagactctgcaattgctttgagcttgcagtgaatatttgtcagggagtgcttctggaaagcagttctaggttgccattctctcagaatcagatggagtgcttcctgcaggtctagattcttgggcccagatgcactgaatcagaatttctgacagtagagcccacaaatctgtaagtacaatacattccctgggtctttctaaaataccctaaagttgagaacaggtcttctgtttatctgtgaaaaatgaaaggggctattaccacctataaatatgtagatttgtgatgaattgggcatttatgggaacaacaagaatattagtcaaaaacagacctggggttgagtctgagactaggaagtggcagcagaatttttaaatttctaattctatattttcatgatttaactacctatcctctaattcagtgtttcttaaactttagtgtgatcagatcgcaaggagctgatagaatccaagcttacmctttcaaagactaatttttaggcaggtgttggggcccaggaattgcctttttaacacgcagtcaggtagtattgtgaggaaatgatccacaggttgaagtctcttgatcctgttcttttgtctcttccaagatgttcttcccttcaggtctcttttttttttattgcctcctcatcttctctatttctttgggttcttctccttagtttgagcagacttaagccactcatatcctaagattattttcttatcaatttgtattaattttctagagatgacataacaaattacccacaaactaggtggcttaaaacaagagaaatttattgacttgcatttttggaagctagaatcctgaaagttctattggtatcatcaggccatgctgtctctgaagcctttaaagagaaatccttctttgtgttttgcagcttctggtacttccacgtatccacttctggtacttccacgtatcccttggcttgcagcaccatgattccaatttctgcytcagtcttcacaaggctgtcttctctctatgtcagtatgtctatgtcttcacatggcattctcctccctgtgtttacattttcctcttctaaggatctcagtcatattgaactaggtcccactctcatcaagtatgacctcattttaaattaattacatctgcaaaccctgtttccaaataaagtcacgtccatagctatgattaggacttaggacttcaacatatctttttargaaacacaattcaatccacaacaaaactgtatgttccagtctaactacttccccatctctctccttttttcagcgaagattctgaaacaaatagtttatactgattgttatcacttatttaccacctacttactgcaatctggctttggatgttactaccattgacagttctggagtgaccattgaagttaattgacaaatctaaagaatgcttgttagttcttgccttacttgttacttttattgcactccagagtattgaatgttctcatcttaaagcttttcttatttgaactgacctaagtcagcctgcttaagtacaacttttagttttactttggtaaattgctatagctgtgaaagtaaattattacaaaagcaatctatgataaaattctgccaaacttgtagataattttaactacactagcacaaaacttgagccattgtgccattaactaggggatcttactgttctttgtcatttaaatgtttcaatcacactttgaatttaaggtttactaaaagcagatacatcgagtgggaattctattattttgcataacctcatgcatgatatcacactgctcatacaaaaaatatttaaaattaaattatagatatctttgtaatgtaactctcatcttgatttcttgtcacatctagaaagcctattgccaagtaatgatattacaacaattttagtggattaagcaatatacatttattatctcacagtttgttttgggttaggaattaaaatatggcttagctaggtcttctgcttagtgtatcacaagactgagatcaaggtaatcttcaaaactgtggtcttatccgaagctcaactggaaaagggttattataagatattatgattattataagctcattcatgttgttggcagaattcaattctttgtggttgtagggccgttaggtcttcaattacttgctggctgttcactggaggccaccctcagctcctagaggccccttgcaattcttactacatagggttccctagtatgactctttgctttcccaaagtatgacttactttgcttacccaaagtaagacagggagaccacagacgataggtgctacaatcttatgtaaccatctaatcatatacccaaatcatatccattctattatttagaagcaagtcacagatccttcccatgcccaaggaatggggctcacacaccggcatgaacaactggaagtgggcatcattggagccactttaagtgtcttctgtccacaaccctaagtctcctcactgtaaatatactgcttaggtatttgcatcttcatatgtgacttcaactgccagttatgtactgttgcttccaaaatctatgtcccagcctctctgtctatcctaaaatgttaatccaaatagtcaactttcttttgatattttgatgtaaatgtagtcatttttatgtggacatcaatctcaacacaattcctttctcttcagattgctcctctctctttttaccattstgaataatgatgcatcctatatccagtgtgcatgggacacaaacctgagattgtgatttaattattctcgggtggaactgagtcatcacagtttttaaaaagcttccagatgatttaatttgcagctataatggataactaatgatctataacattactctattttgtctgcttgatattattatgcttatttccttattttttttttctatctctcttctagaatgtaagcttcttgaaagcttcttcatcaatatattactgtcttagatggttaggtctgctataagaaatacatagactggatggcttaaacaacaaacatttaattctcatggttctggaggctaggaagtctaagataaggtatcagcaaatttggttcctgatgaggcccttctttctggtttgcagatagctgccttgtggctgagaaatcatctatcttgagtctccttataagrgtgctaattctgttatgagaaccacaccctcattatttaattacttcctagaagtaccccttccaaacwctaccatattgaggtttacgtctycaacatacgaattttgagaagacataaacagtcactaacatacattacaatatttggcatatagtaggtatttaataatttgagtaattgataaatactacttattatatgtcagcattatgataagtgctctatacagatgttacttgacttatgatatggttacactcatcctgacaaacccatcataccatcataagttgaaaatattataagttaaaaatttatttagctgggtgcactggcatgctcacgtagtcccggctatttgagaggctgagatggaagcattgcttgaacccaggagttcgaggctgtagtgcattatcatcacatgaataaccactgcactccagcctaagcaacatgtagagdaaaccccatctctacaaaaaaaggaagaaaaaagaaaatgcattcaatatacctaagctaccaaacatcrtagcttaatctagcctaactacaaatgtgctcagaacccttatattagcctacagttggacaaaatcatctaacacaaagcctattttataataaaatattggatgtcttatataatttattgaatactgtaccaaaagtgaaaagcagcatggttatatgggtactcaaagtatggtgtgtactgaatgcatgatgctttcacacatgcttcacatggtaaagtaaaaaaaaaaatcataagttgaaccatcataaattggagaccatctgtatacattattttattaatcctcacaaaaacgtatgagtctattttcaattccattttttaaaaaactgattaggtaaatgtagtaaagcaatttatctgaggtcacatataaagtaaagctgtgattgaaactaagtctgcctaacatcaaaactcatggttctgaccaatatgctaaacatatgctttccagctacatgtatttattgccgaagttgttataccttttagtgtgttgtttcttttttggaaaagcctatttctttgctgattcattaatccactgtggtaggattaaaagtcagatcatgtagctccaccagaatatagttatcttttcatgttgtgcatgaccatatatattcaggtttctgcttctggtggttattctaaatgcagttattatcaagtaatgcttaccgcttgccaacaatgtgctagacacagagcagagcakagcatctgacatgctttccattctgcactctgatccataactttcatccataaatctttttgcaattttacaaacatgcattctccaaacattcccatgaggtaaatgaatatttattatatccactttacagatgcataaagttagatgtagactaattaagtaagttcttcaagggcagagagtgagttggttggaaaatcaaggttagcattgaacattctggatgcctgcttctaaaaggaatgaatggtgtgttaagttgatttcactatacatagttgaaaatgtttattttaagctttcatgatatattttccattagtttttggacattgcccagaagaattcacagtaaattaatagtcagcccttagatatgtatgcagtttgtgtctgttggcttctgtgggagatgcaaaaatgaaactgaagaaagaatttagcccatagtaattacatcttcctgtagagattctggtaattatgtttggatatttttttcactatataatttaaagttttgtatttagtaatgtacctctaatttagcatatagaagtaagcagctaattaaactgagattactttctactcacagccaacatttaaaacatagttattattacaaaattttttaaagttatattactttttatgaatatgaactcaaatcaaaatgcatagcacaataacataattaagaaagactgtattagttcggtgtgttgccatttaaagatccaaattaaaactatatgcttttcattccaccaaatggtagatttttagaaccataaaagatccatagttgatttgtggactcacaactggtccttaaacaacatgatacatctttctgattcttttgttattcttattttttaaatgataatttgatttaactatacagatatgcaactatatatgtataagcatcacctctgtgtataattttcaatttgttcagattttgagattttgtcgaatctatatttaaatttagatgcatggtttatgctcaaaatcattttgatggaaataatattttattatagtccaacaatgctataaataataaaaggaatgaatatacaaggttaaataggactttattttcatctgtatatactgtttgaatcactgatgagcacatgcactaatataaaatttcctgttaatacatgccaaatcttgttgtagatgtgtgtcgtagaaaggtaggcattagatataaatctctataatgaatggtattttaatarggcaatctttaactttctgtttcacaagcttctattgagaatttgttgggaccattttatggtatcttaataaatttgctgggctatacattttataaattgacttcctaagacagctaccccattaataggtaaatagataatacttccatttatttattatttctgaaggctttccacctatttgcaagtattagtggacctgtcatgaagaagaaaataaaaatagattgaaatagtacaactggcagtgtgattattttgtattctaattgattagctgagggagaattatgtaactttcatcagttggactaaaactttaaatcattctaccaatagaattmcttttaatcatttaccaaatttctcaccaccaaaatttcacaccaactttcacctcctttaccattcccaaacctagaaaacattattttgttctccattctaaatttttttcatttcaaaaatgttattgaaatgaaatcatatattatatgatctattaaaactggcttttattaactcagtataatccattaagaataatctaagttgattgtataaatagtgtgctgctttctattactgagaaacatggtgtatttataccatggtttgtttaaccattcaccccttaaaggacatttggattacttctggttgttaagtrttatgagtaaagccactgtgaaatttgtgtacaagtttttgtgtgagcaggtttcatttctctgaagtaaatacccaagaatacaattgctggactctatggtgtattcacttcctgttgccactgtaacaaagaaccacagtgatttaaataatacaaattttgttatcttacagttgtgggagttagaaatctcagtggcctaaaatcaaggtgtgggcaggtttgtgttccttctggaggttgtaggggagagtcggcttcctagttttttccagcttctaaaatgtgtccacatttcttgatcatggcaccatccttcatcttcaaagccagcagcacagcatcttcacatccttccctctcttgcttctttctctcacctctgcttctgttgtcacatctcctctgactctgactgtcctgcctccccgttctgttataagtattcttgtgaacactttggatccacgtggacaacccagattaatattcctatcctagggttcttaatttgatcacttatgcagagtcccttttataagtaaagtaacatatttacagcttctggggattagggcatagacatctttatttgggggataggagcagagaagggtggcatcattctgcttactacatatagtaggtgcacatttagttttatgagaatttatgattgtcagcttcctggaattcatcacacacatacatgcatactcatacacaaatgtatatggagaatgtacatataagttgcatagttcttattattaatattcaaatgaaggaagtgttcccattcctgaagagaagtaaagatttcctcttactaaattgctaaggaaatttctcccttggaaactttacaaaggctacactgagagaaaataacctagagttttataatgaacacatacatgatttttcatttgtcartttcttacagtgacctgatgaaagctgagagcataatattgaagtccagctctgtaaaggcatttctgctaatgtgatcttggtatccagctgaaaataataaaatatgctcactagaatttcccaattaaatatttgcttaataatgaaatttgctttaattttccattgaaaactcrcttcttttttattttattttattttatttatttctttttttgagatacagtttctctcttattgcccaggctttagtgcaatggcgcgatcttggctcaccgcaacctctgccacccgagttcaagcaattctcttgcctcagcctcccaagtagctgggattacaggcatgcgtcaccacgtccagctaattttgtatttttagtagagacggggtttctccatrttgatcaagctsgtctcaaactccggacctcaggtgatccaccctcctcggcctcccaaagagccgggattacaggcgtgagccactgcgcccaccctaatttttaaaataatcagttatttattttccgtggattttcccctctcaacaaaaaaaaattttacacaactttttcccaatattttctttaaatcatcagcaaaaaatatgaaattacatttcgtttttaatattctatacttttctatggggatgcctgctttattttacaccaatttgcaaagataaaaatgattatatgaaatacataaaatttattcttaattgctctgaaaataaaccttaatatttataagcaatgtgatttgggcattatattttaaaagcttaagtcaacttgtcataaatttgcatccataaatctaatttagcattacacagttttttttttttacttttacattagattatgagagtacatatgcaagtttggtacctgggttatattgcatgatgctgaggtttggggtatgaatgatcccatcacccaggtatggagaatagtacccaaccgttaacttttcccactcttgcctccctccctccctccatgccctagtagtccccagtgtctattgttgctgtctttatgtccatgagtacccagtgtytagctcccacttataagtgaggacatgcagtatktagttttatgttcctgtattaatttatttagaataatgttttccagctgaatccatgttgctgcaaaggacatgatttcatttttcatggctccatagtattccatggtgtatatgtatcatattttctttatccaggccatcgttgttggacatctaagttgattccatatctttgctattgtgaatagtattgcgatgaacatgtgagtgctgtccctttacggtagaactatttgtttacttttggatatacatccagtaatgggagtgttgggttgaatggtagttctattttaagktctttgagaaatctccaaattgttttccaaagtggctgaattaatttacattcccaccaacagtgtataagcattctcttttctccacagcctcatcaacatctgttgttttttagctttttaataatagccattcttactggtgtgaggtaatatctcaatgtggtttcaatttgcattctctaatgattagtgatgatgaacattcttttatacatttgttggctactgtatatcttcttttgagaagtgtctatttatgtcttctgcccgctttttaatggggttatttgttttatgcttgttaagttgtttaagtttcttacagattctggatattagamctttgtttgatgcattgtttgcaaatattttctccagttctctaggttgtctgcttcttctgttgatagtttcttttgctgtgcagaagctctgtagtttaattaggtcccacttgtcaatttttgctttcattgcaattgtttttttcttatttgtttttgtttttgttttgttttgttttgttttttgagaacctaatcataaatttttttctcaaggcccatgtccagaatggtgtttctgaggtttttttttttttttccctaggattcttatagtttgaggtcttatatttaaatctttaatccaccttgagttagtgtttgtgtatggtgaaaggaaagggtccagtttcattcttctgcatatggctagacagctatcccagcaccatttattgaatacggagttctttccccactgtttatttttgatgactttgtttcagattagatgactgcaggtgtgtggctttatttctgagttatctattctgttccattggtctatgtgtctgtttttgtaccagtaccttatagtataggttatataggctaatgcatagtatagtatagtatagtataggtataggtatagtatagtatagtatagtatagtatagtatagtatagtatagtatagtatagtatgtatagtttaggttacatactacattataatataagctaatttgtagccttgtagtataggttgaaattgggtaatgttatgcctccagctttgctctttttacttaggattgctttggctattcttggctctttgtttgttccatatgaattttagtataatgttttccaattctatgaaaaatgacattggtggtttgataggaatagcattgatctgttgattgctttgggcagtatggcctttttgacaatatagattcttgaatttcatgagtatgggatgtttttccatttgcctgtgtcatctatgattttttttagcagtgttttgtagttctccttktagagagctttcacttccttgattagatgtattcctagacactttattttattttttgtagcatttgtaaatgggattgtgttcttgatttggccctcagctagaatgttatcagtttatagaaatgctactgatttgagtacattgattttgtatcctgaaactctgctgaagttgtttatcagttccaggagttttctggcagagtcttttgagttttctaggtatagagtcatatcatccacaaagataagttgaattcttcctttcctatttggatgccttttatatctttatattccctgattgctctggctagcacttccagtactatgtttaataaggggtgctgagagagggcatccttgtcttgttccaggggaatgctttcagtttttgccctttcacttggctgtgtgtttaacatagatagctcttattattttgaggtatgttcttttgatgcctagtttatcgaggggctttaacatgaagggatgttggattttatcaaaagctttttctgcatctactgagatgatcatatggtttttgtttttaattttgtttatgtggtgaatcaatttattgatttgcatatattgaaccaaccttgcatcccaggaatgaagcctacttgatcatgataaattaactttttgatgtactgtggaatttagtttcctaatatttcttttaggatttttgcatctgtgttcaatggggatattgacctatagttttcttttatcattgtatctttggcaggtttggtatcagggtgatgctggcttcatagaatgagttgaggaggagtccccactactaaaatttttgaaatagtttcatatagaatattctcatcttttcctcttcttcttttcttctgacaatttctcacttgtcttctgcacctcatatttgttttgtctgatataagaatagctactcctgcttacttttggtgtccatttgcatgggatgtctttttccacccctttaccttaaatttatttgagtccctacgtgttaggtgagtctcttgagagcaacagatagttggttggtgaatttttatgcattctgcaattctgcatcttttaagtggagcatttagaccgtttacattcattgttagtattgatatgtgaggtactattccattcatcatgctatttgttgcctgtatacctttttttctttaattgtatttttgttttataggtattgtgagaattatggtttaaagaggttctgttttgatgcgtctccaggatttgtttcaagatttagagctccttttagcagttctcatagttctggcttggtagtggcagattctcagagcatttgtctgaaaaagattgtatctttttttcatttatgaagcttagttttgctggatccaaaattcgtgcctgataattgttctgtttaaagaggctgaagatagggtcccaatcccttctagcttgtagaatttctgctgagaaatctgctgttaatctgataggttttcctttgtaggttacctggtgcttttgcctcagctctcaatattctttccttcaccttgactttagataacctgaagacaatgtgctgaggcartgatctttttgtgatgaatttcccaggtgttctttgtgcttcttgtatttggatgtctaggtctctggcaaggccagggaagttttcctttattattcccccagatatgttttccaaacttttacatttcccttcttcctcaggaataccagttattcttaggtttggttgtttaacgtagtcccaaacttcttggaggctttgttcattttttcttattcttttttctttgtcagattgggttaattggagaccctgtcttcaagctcagaagttctttattctgcttgctccagtctgttgctgagaatttccagagcattttgcatttctataagtgcatccattctttcctgaagttttaattttttttaatttatgctatctctttcattgaatatttttcccttcgcttcttgtatcttttttaaaattttcttagattgggctttgcctttctctgatgccttcctgattaacttagtaactgatcttctgaattctttttcaggtaaatcagggatttcttcttggtttgaatccattgctggtgagctagtatggtatttgggggatgttaaagaaccatgttttgtcatagtaccagaattgttttttctggttccttctcatttgggtggctatgtcagagggaagatctggggctgaaggctgcwgttcagattcttttgtcccacggcatgttcccttgatgtagtactctctgtctcttcctagggatgtggcttcctgtgatccaagctgtagtgattgttatctctctctggatctagccacccagtaggtctaccaggctccaggctggtaccgggggttgtctgcacagagtcctgtgatgtgaaccatctgcaggtctcatagccatggatagcaacacctgctctggtggaggtggcaggggggtgaaatggactctgtgagggtccttggctttggttgcttaaggtattatttttgtacgagtgggcctcctgccaggagctgtagtagtatggggaggaagaagtggtgggcaaggccctagaactcccaagagtatatgccctttgtcttcagttaccagggttggtagggagggaccattaggtgagggcagggctaggcatgtctgagctcagcctctccttgggtgggtcttactgaggctgctgtggggatggcggtgaggttcccaggtcaatggaattatgttcctaggaggattatgcctgcctctactgtgtcatgaaggttgtcagggaagtgggggaaagccagcagtcacaggcctcacccagcacccacgcaacccaaaagtctcactcccactgtgccccctccaacagaaccgagtctgtttccaaacattgggagagcagggctgagaacttgtcccagactacctgcctgccagctatgagagcagttagggcttttgttcttccccggcctgtggagtcagcacactggatttgcacactcccccaagctctggccaggagatttcctcaatgggttgaaattgttaaaaaaaagttcgactggaaatttccttccttctgtggccttttcccagtgcctctggctgccctccccaagggcctctgagaggcagggaagaaatggcctgctaggggacccagcaagcccacagggcttttcctgcttcttcctctacttctgcatttcacttggttctctaatttgtttcagctctagggaaggtcaraatcttcttccatgatctagaccttcaggttccccagtcagggtgtgtgttcaggggcagacaattcccctttctacttccacagtttgggcacccacattatttggggtgtctcccgggtcctacaggagcaatccacttccttcggagagtctgtgggttatctcggctcttctggtttattcctgccgaggttctagagcaaaacgtcacaatgtgagtctctacacactgctctgtctgcaaatgagctgcaatctagtcttgcctccagtccaccgtaatgttccccttttcccaagtctcatcttaatggaaagacgatgggccaggctgccacctcctaagcctttcagtgcccaggragtcattgtctcccaactgggccctcagtttacagttttaacatgagatcattgcaactctgatgctgaactagtgtttagtgtttaaaaatagcctttttagtaaaatggtaaaagttaataagtgatcatgaaataatttcatcttttccttaatgaaatcaagtgtgcattcacaaaattcatttggtcagtgtaattactttcttgagttctatgtgcatggcaaatgaaaaataatgttgtacgaaacttaagaaccttccaaaaggtgcctgagtatgtgattttgtgtttaacacttcactgcaaggcccacaggtatcagacaaatataatcttaatgaaaaaattttgataggtgtttttaaacactcaaaacctctgcttatgaaagcttctctaatatttctcaattcaatgtttaagcactaccttatttgctcataaataaaaatattttgtctttgatattaacattttatgtatttctgggtaatttatttatctagtgataagtgtgatttctaagttctgtacagctttattcaggttgatgaaatacagtcatagagatcttatttcaggtcttgcctctaagaccttgggctctgttctgattagcacaagggagagtgggagcttagcaactataagtaggactttgagagagaagtataaaatgaatagggacagcattgtcctggacatccctttccaaattcagtctgagcatcccacatctgacatcttggtatgtttaaactctggcatcaccctaggaaataacatttcttgtccactgttatctacctttcaaatcaatagccctgaaagccactcttccttgacttgtgacaagagttaacacaagagtctttttccaccaaactatttatctgacactaaggacaagtccttctgtcagatgagacaataaaatactggtaatgttacagtgtaaatttgtggtgatttagccttcaataaaaactatggttttacaaagcatatttagaccacttccaattttattgttttatatatcatgaagtaattttacacacacacacacacacacacacacagagacacacaatcaaaatagaattttttacaatttcatgagaagggaatcaatcttcagattgttaaacactaaaagcacycctatgcttgcctgtaagctggaatcattttttaaaatttttggtaataatcacataatatgaaaaccaccttattaaaaaatgtttaagtaagtatacagtatggtatggttatctgtatgcatattgttgtacagcagatctctagatttcatcttgcataactgaaactctatagccattgcttggatgaaggagaaacaggaaattggtgtgcaatggtaatagagcttaataactttgtgttgatttttgtatatgatagggttctagtttcattcttatgaatgtggatatccaattttcccagcaacacttattgaaatgatagttcttttccaatgtgtgttcttagcccccttgttgaaaatcarttggctgtagatgtatggatttacttctgagctctctattctgttccactggtctatatgtctgtttttatgccagtatcatgttgttttggttactatagctttataagtttattttgaaatcagatagcatgatacctctaacattttttctgtttgctcatgattgcgttgactacttgagatcttttatggttccatatgacttttaagattcttttttctatttctgtgaagaacgtcattagtattctgataaaggttgtattgaatttgaagattgcttcaaattatttgtcttctattccattttttttcaccaatgttttatagttttcagtgtagagatcattcaccttcttggttaaatttattcctggcgatatttktttttgtagctattataaatgagattttttttgtgtgctatcagcatatagatacactactaatttctgtaggttaattttgtatcctgcaattttactgaattcactagttctaacagtttttttgatgcattatttagggatttctatatataaaatgatgtcatctgcaaaaaaaagataatttggctctcaccttttctatttggatgccttttatttctttttttctttttttttttttcttagacggagtctcgctctgtcacccaggatggagtgcagtggcgtgatctcggctcactgcaagctctgcctcccaggttcacaccattctcctgcctcagcctcccgagtagctgggactacaggtgcccaccaccatgtccggctaattttttttgtatttttagtagaggcggggtttcatcatgttagccaggatggtcttgatctcctgacctcgtgatccacccgccttggcctcccaaagtgctgggattacaggcggccttttatttctttatcttgtctaatagctctagctatgacttccagtactaagatgaataaaagtggtgaaagtaggcatccttgtcttgttccagatctttcaactttttcctgttctgtattatgtcacctgtggatttataatatatggtttttattgggttgaggtacatacttgctatccctaatttgttgagagtttttatcatgagaaaacatagaattttctcaaatgcttttctgcatttttgaaataattgtatgttttttgtcctttattctgttaatgtgatgagtcacacttgatttgcatatgtagaaccattattgtatccctagtgtaagtcccacttgytgtgggacttttttactgtgagtgactgtgactttttactgtgctatttaattcagtttgttagtattttgttgaggatttttgcatctgtgttcatcagaaataatgacctataattttcttgctttgttatgtccttgtctgattttggaatcaaastaattcaaacctcatagaatgattcaggaagaatttcatcccttcaaytatctgaaatagtttgggaagaattggtattagttctttaatgatttggtagaatacagcagtggaggtgtcagattctgggcttttcattgctggatgaattaattattgattcagtcttgttacttgtcattagtctgttccaaagttctacttcttcatgcttaaatcccggtagcttgtatgtgtccaggaatttatccatttcttgtctcttatgatcctttgtatttctattgcatcaatggtaatgtctcctttttaatctctggttctatttatttstcttctcttttttcctagttactctggctaaacatttgtcaattttatcttctcaaaaaaaaaaaaaaaactcttttgttgatcttttgtattgtttttgtcatctttatttcttttactcttgctttgatatttactatttctttccttttagtaatttttggtttagtttgttcttgttttactagtttcttgaggtgtaatgttaacttggttgtttaagctcttcctggattttttgacattgatgcttgttgccatatacttccctttgagtactgcttttgctgtatcccataggttttgatatgttgtattttcattttaatttgtctctaaaattttaaaattttgcttttaatttcttagttgacccattggccrccaagagtgtgatgtttaatttccatgtgtttgtatagtttcctgcttttactgattctagtttcatacactgtgattggaaacaatacttaatatacttttaatttttaaaaattcattaagacttgtttagtagcctgtcgtatggtctattctggataatgttccatgtatatgagaggaatattctgatatatccctctctgctacttttggaattctattaggttcattttctctagagtgaagtttatttccagtattttaaaattaattttctgtctggttgacagtggaatactgaagttttctactattattgtgtagttatctttctttatatctattgatatttgctttatatatttaggtgcttcaatgttgagagcatatgtatttaaaagtgttatgtcttcttgattaattattccctttatcattaagtaatattctttctgtctcttgtgacagttttyaacttgtagtctgttttatctgacttcaatatagtcacccgtgctctcttttgattaccacttgcatgggttgtcttcttctatccttttactttcagcaaatatttggccttgaggctaaaatgggtcttttggaggcatcgtatagtttgatcttgtttttttaatccattctgcttttctgtgtctttgattggagaatttaatccatttattttcaaagtaattattgatatgtaaagagttactactgatgttaccgggtggtccttgctcccagagctcccaagatgttggcaggctgattccaaaatggcagcaggctgcttccaagatggtggcaagcctcgtgttctctgacctggggttcttggcctcatggattccaaggaatggaatcttgggccatgtggtgagtgttatagctctattagaagctgtgggtcacagaagagagctggggaacccagtgactagtgttcagctcgattaggacgaacccgggcacttagccgtgcaggaacaatggtaagcctttagcctgatcgggagcggcaatgggtgcctccccggatcaggagcacagtggacaccctgggacaacctgccagatctggagggatggaagtcaggggcgggtctgagatgtcagcaaacagcagtggtggacagcaagacaaaagctcagctccagccttaacraacacagagcagaagagagtgcatttgcaagatttaatagagtgaaaacagagctcccatacaaagggaggggacccaaagagggtagccgttgctggctcgaatgcctaggtttatatcccgatcattgtccctctcccagtgctttcaggcaatagatgattggctatttctttacctcctgtttttgcctaattagcattttaatgagctctctttactacctgattggttgagtgtgagctaagttgcaagccccgcgtttaaaggtggatgcagtcaccttcccaggtaggcttagggattcttagtcagcctaagaaatccagctagtcctgtctctcactgacattttgtaatttgttttctggttggtttgttgctctttcccccctttattactctcttgttatttatctttttgatgtcctgattttatgtagtgctaagctttgattctttcatatttatcacttttgtatctgctatagtttttggctttgtggttgttatgaggcttacataaaatattctattgttttaacagactattttacactgataacaacttaacttaatttgcatacaaaacctctagatttttaccctccctcccacaatttatatttttgatgtcacaatttacatctttttatattatggaattttaaaaacttattgcagctatcattatttttgaatctttygacttttaacatttatactaaagatatatatactatttatagagcaccataacagtcttggggattctgaatttgactgtatatttacctttacctgagaattttttactttctaaaatttttatgttatatctagtgttcttttgtttctacttgaagaacttccttaagaatttcttctagggaaaatctagtggtgatgaattatttgacctttgcttgtctgggagaaagactatttctccttcatttcttaaggatagctttgctggatatagtgttcccaagtggcagggttttttttgtttttgtttttgtttccagaacaatgaatatgtaatctcattctctactggcctgcagagtttctgctgaaaaatccactgatagtctgatggagattaccttatgcatccgacttgatgtgtttctcttgcttcttttaaaattccctgtttgtctttacyttttgacagtttaattacaaatgccttgttgaggacaatttttggttgaatctgtttggcaacttttgtgtttcatgtatctggaaatccatatctctttgaagacttgggaagtttctagcaattacagcattaactaagcttactgccccatttttgacgctttcctttctggaaatcccataatattgtttgtttacttaatggtgtcccataagtcccacaggctgtcttaattctttttcattcttatttcatttttatcctctgactgggtaattttacatgatgtatcttcaagttcagatattctttcttctgattcacctagtctgctgttgaagctctatattgtattttttcatttcacttgttgaattcttcacctcttaatatttctgcttgtttcttttttatatccatctctttgcyaaatttatcattcagataatgaattgttttctggatttcattaaattgtttatctgtactctcttgtatctcactgagtttccttaagatcatgattttgaattccctttctggaaatttgtagatttatttttccttggggtctgttgttggacagttactgtgttcctttggggtgtcatattttctttgtttctcatgttttttgtgtctccatgttgatgtctgaatcaggtctggaaattacttcttccaaattttactgagtggcttttgaagggaaagactttcacctgcagatgagtctaactgcgctgtttgggaagagtgtggtgactctggttctgagtaaatgcaatggtacagcctccagtgcagcttcttcaggtgcaattcacatcagtgatgactgtgggtgcctctgtggcctaggttgtagcagtttgtggtggcagtggtagcataggttattaagttccttcgtggcaagggctgttggggtcctcccattctcatttccttcaaaatagggatacttagcttaggggacctctcttggtgctggatctgacatggcatgcaagctgtgacatggcctacaatctgtagcagtgctgggttccagaatgcaggtgctcagaacagctgtagagccaaggtcctagactcagggtgtcaagaacctattgtggcacctgagtcttgggctgtagattccctctctgatgcagagttgaatgtagattcttcacagagccaaagtctctgactctaaggcaccccctggcagcttgggctcagaggaccaggttgtgtctatgacactgaaccctgaggaacagggcaacaactttggctcagttctggggaggaaagggagatttgggcccaaggagcaaggtgtagctgcaatttgtgtaccagagccaatagggctcagtggcaactcaggtctcagggaatgaggcactgtgtagtggtgactctgggccctaggatggtgggactgagcattatcccagactgtatgaagccaggtacaggaacagccaaggcatagaattgtggaacacaattgtggcttgggcccgggtggtagggarcagcacaataatgacttcactccctctcaggaggtgggtgtttctgcagcttagactctagggagataatacagctccagggaagctaagtactagaattgtttgaccttttgggtaaggtgtctcagctcagccactgctcttttcctgggaaataggcttccccagtagctcagccttgggatgtgtgactgcttgggttggccaaggcaccagttttctaagaggcaatgtgccacttcagcccaggctcaggggctatgacttctcagggtagccagggtattttccccagaggtacagtacagctttactcaggcacagggtagtgtgaatgctctttgcagccaaagcattgtttccccaggattcagggtaccacttcagctctagcaaaggggacagggcatagcagtgactgggaggggtacatggagcagctctgccaaggcactctttccccaggcagcactgtgcagctttacctctggccccaagggacagggcacagcagtgactgrgaagggcataaagaggggctccacaaaggaatcatttttgcaagaggaagtatgcaatttcaactcagtcctgagggagcaggacaaagctgtgtctgggtggggagggtgggtgaagtacctctaaggctgcttgaccccatggatagggtgtagtaggagctggaggtttggctgggggatgtcaggccactgggccagggtagttcagcagtagctaagcctcaagggtagaagggtacaaaggccatacactgctacaacagaacacactccaacagtacttccaactctaagataatgtagaatagtagccacatgggctacagggaccagggggatggtgttggcttattctctcggggaggatagctatttgaacactaggaagggctctcagctcaccttagtgcctgaaaggactgcaggggtccccagtggttaggactgtaggcgtccaaggtgttaatgtgggctgatggtgtcctcttgcttaccatttccccacaagaagaagttccttctggttccaaactgaccctggcagggggatggggtggttgaggccaagtgttttattttattttatacatggctttcctttctctccagggtttctgatactcctttgatgtactccagtgctcttctttagttatttttattaaaacatagctgtttattcattgttttgactgtatttgtcaagggaacgaaagataagggcttctaatcaaccattttgctaatgtcacactctcttttccaggagtttttttatttcaagtcttatgtttaagtctttaattcattttgacttgatttttatgtatcgtgttaagataagggtccaattttttcttttgtatgtaaatatttagttttccagacactctttgttgaagacattatttttccacctttgtatagtctcggcactcttgttgaagatcatttgactatatatgcataagtctatttcaaccttccctattctgatccattgttctatatgtctgtctttatgccagtaccacactgattagattactttaacattgtaatatgatttgaaaccaggaattgtaaagcctccagcttttttgttctttctcaagacatatatatatatatwtttttttgctagtctgtctgtttccattgtggttcctgatgagttttaagattttcttttttttttttttttgagatggagtcttgctctgtcaaccaggctggagtgcagtggcgcgatctcggctcactgcaagctccgcctcccgggttcacgccattctcctgcctcaggctcccgagcagctgggactccaggcacctgtcaccacgcccagctattgtttttgtattttttttttttttgtatttttagtagagatggggttttactgtgttagccaggatggtctgaatctcctgacctcgtgatccgcctctcttagcctcccaaagtgctgggattacagatgtgagccaccgctccgggcacacttttttgtttttgtttttgttgttgttgttgttgttttgtatttctgaaaaaaatgccaagggattttcataggaattgtgaaccaaataagaaggaaccaaacacataacaagagtccttcatgttatatctttcatgaatacataagcccggacatcacttaatgcttggaagagtgagatttttaggaaaaatattctttagcgggattttactttatttctgcagatttttctcctcctttatacctgacatgggaaaagattttggcgaccatcatttagtatccatgctctctctcaacactcagaaatctatagctatcttttaaatgtagattaaagctttccaacattgacatatgaaaattaaaaaagcaaaacttataaggaccaattctgattggtttgttaaaagcctaagggccatcagctttttatctgttattaatttattgtttctcctacccttagagtacctctggtcacttttactgcttctacttctccacaccacgtcctactcctaaatttgtgctataaaatctgctacattytttaaatattatattctatagtagttctactctggaaacattgttttattacctaatgaattcttctaggaactaaccagctaatccttttataataaccttatctgaagcagttatactaactgcatgatgcaaacattttcttgctgctttttaacaaagccagattcttattttttgacaaagtctaagcaaatgtaaacatacattcaaaaatattaatagaaatctacttcacacataatcttaaatgagagattattaagaatcaaatatttcacttgaattttgctaaaaataacaaatagtgtaaaggcatactgtaatattttttctgttctgcaaaatttgagttgccatacaaagatgattagattctgtccacataggactggaaggtgacatatttgaaacagagaaacagaaaagttcaagtttggagagaatcaaacccatagtttattacagtggaaattgtgcagataaattactcttcaaaattgtttttttttaaggaaaaaatacaatatcartacaaacttactgtatagttcactggcccaaaataaagcacttgctgaggaaaattaacaagctatacttgaatccatcccatatttattaactgatgttagtctgtgaaatacttcatcttaccattatgtaatgtgagtataataacattgcagaaaggatgttttcattaaaaacatgtggttatcttcaactgaagtagattacatgcaaggaaagttctatgtgctttattatattagtacaagtaaggttatatcaaaaaagtaatacataatgaaaaattttaattggatctactgcttttcaaatattcattttttaatcaatttgctttaactaataggctaccgtgataagctgctattctgctcatcacaaggagttagagtcctaattatttaaataaacagaaggaagaaaggaaggaaattaattttgacaaaggacctgaataatccataaaccagatgcctttaggtatgaaattataaaagttttattaatcctttagtgtaagttatatttttatttgtgtgggttgatttttctcacattcacttttttatagttgctttattattatgtaaattaatttttatgtttgaaaaaatacaatatttaaatatttataaacaggtacctattataaaatctataaacatattagcaatttgctatataaaatatttcttttactcagaaaaaaatattaatccttaatttttagatcaaatgtattaaaagcaattcagcaataactagaggaaaacattcaacttcagtgcctgraaagattcatattcagttcttgtaaattgttgttttccagctattgaaatattttgaattttatatttacaggaacmttagaactattaaatataaaacattaaggactaagtttaatagcattttgtgtaaatgtgaaaaattatgtaggcttggtacttgatttattaagatttcatttaaaacagctcatgttcattcgtctgaatacttattactgaacagatttcttggatcacgagttctctgtctacatttatgcattttacacaagctgttggctttgaacactaggaaatgtttataaaaaactaacaaaaataattatagttttaatgtcactgcatttttatttgaagttgactggatgatgttgaatagctctaagttttataaacgtactttttatcttttcaaaattaatattaacaaaataaatttaatctcagtgaaatgatttataaagttttatactattttatttatttaaagsctcctgaaattcattctgaatgtatcggcagaataaatacaattatatatgattattttcattgactttagaaagcaacagaataattattccttgcacattttaaatatgcwacagacttcagacatatgttttaaataatcatcagtattatcattgtcaaaattaacttccttattattatcatcattttttctatcacctttgccacaattatgactgtggtagtagctattgcacattttagaccatataacaaaaaaattaatttcttcctaacacaattatgtatcatggctaatagctgttatgatgttgatgttctttatatatacacatatatatgcattgttaatagtgtatgtacatactctttaaaaatacaaaaggaaatttctgctcaaatacataaaatgtactgtcctatgttctttatatgcagatataaattacatgtccctaacttcagccacttcccgcttaatttctagcagggaagatatggtgttagaaagatttgtagttgtagctctttgattttctttagttaaatagttagatttttatttaaagtgtgagttaagcattttcatgtattaaagtgggaataaggggaggagagtttgaatataggagagaagaaaatgacaaggaaaaatcttgtagaatacaggaaggaataaagttcatagaagagaaactggtctaagtctgaaaagtacctgcctcccgaggagacttaatattggagtaataggaataaattaataaactgataagataattgagggagagcataatcagtatacaagggcaaaaaattgatgactttctatgtcatggtctttattttcttagtgaaaacgaagtaagatcagctctggatacctcctaactcttcccctccttctcctgatgagggagaagtggaggcccaaggaaaatgagcaagttttgtaacaacacgaatggggaaggatgggaaagagaacagaatcggtggaggtaaaaggtctagaaacttcactaaagacattgtacattaaaccttgatcttccattgtatccctgttaattgaaaattgaatttatgcaggaaaagtattctttttttaacttctatttttaagttcaggggtacatgtgcaggttcgttatataggtaaactcgtgtaatgggggtttgtggtgcagagtattttgtcacctrggtgttaagtctagtccccattagttatcaggaaatgtattcttaacctgtcatttgaatatgtcagagtttatagtatccaggttgccttacctacagggctaaatgatatttcttatttccaggatgtatgagaaggggaaaaagtaaaggaaggtgcaggaaattcagtaaagtacattttgagggcttcaatgaaataacttagaaatttgtctaagtttgtcacatattctggaatctgacatttgctgtgtcttaaggccagtactgtcttcgtattaacattatggtttttaaattgtgtgtgtgtgtgtgtgtgtgtgtgtgtataaatttttttaagagtctcactctgtcaccctaggctgaataacaatcatagctcactgtagtcttggattcctgtgttcaagcaatcctcttgcctcagcttccggagtggtatttaataatcttttctaggaacatttgattattatggtgatttgattctgaatgtggatggaaaggagatgaaataattcatcttatttagaaagtctccagtatattaaacatatagaactatcaaatrattgtgtttttttctctgggaaatctcactcatgagcatgttttttgtttcaaattaatacttcgcacaattctttcatctatttatttagctcagtactctaccacaagcttcagacttgcttttctcactcaaagcatagctttccaaaacaaaactacactttctctagtatttcttttcttaataaatggtaccactgaagctagaaagccattgccctccgtcttttcttaccctgctttgaatcaactatcaaatcgggttgaatttatctccaaatatgtaggttttcttcatctctcatttgtactactaagcttcctgaattatctctttatctgcaatctggattatgacttcaagttaccataatccaacttccttagcaggcagagtcatcttagctaaaatttatatttggccatattattccctagtttatagtccttaattgctttctacaacccttagggtaacataacttttcttaacatggttatcaaacactgcataatgtggcatctgcttaccctttggttttatttcttgtgacrcttctagtatgctaagctcttgctctactgatgtgtaaattcaataccaatgtttcagayacctgagtcctttctcatgctgaaccccctctgcttgatatattacttcctaatctttattttcacctacctggaccaacccttactttttcgataaatttaagtgttgtaaattcaaatgttacttccatcagaaggtctccttgactgctgatgttgttggatgtcccactttgcattcttacagagtactgtacttcscctatgactttgctaatcaaatattattgtgataatgtcctatttaattcactatttcttctatactgctctgtatgagaggacagatcaagtataccaccttcatctctatcatttattgctatgcctgacaatgtctctcaataagtggtcattaaatgaatgtctagaatgctgtgaattcaaatataataagataatagatatttttatttttactatttcagatttcaattttttctcggtgtgctgtttcaagatacttccttttaatattctcatttttagaacaagttattttcttatgcctctataaacaaatatatttataaattaatttataaaatcaattttggactgtctctctcatttaaaatattccacactgggctactttcaaatttcaaatcttatatccatgggttctatgtaaagctatttagaatttacttttgctaatttttcattacagaagacatcatcatgacttattgattctaaaaacacgaattattttagcttactgcttgagttttttattaatttaataataaatttggaattttrtttgatattgagagcatagtaaacaacattatcaactttgtgcttgtttttcaaaatccatatgatgatttataagacaaataaggtaaaacctgtgcttccagttatgtttaataatgcacactcccagcttttcttccctttcataagcagatttgyatctgttgcttactgctggagacagkaatcaataatgatgaataacaatgtatgtaattcactcagaagaggcatattacatggactttagaagcgaattacatgaaaatcccccctgaaatgccacaggagtcattgataaatgggatccttagagcacaatatatgccagactggctttagacagcataatggttttgcccataagtaaataagtaaatctttgtcatcacacattgctatttytttttagacttgctcttcagttatgggcaactgtgtacaaatatgctatattaatttaatagccattaaagaagaaagaacgtatatactttcaaactgatgatatgtgtcaaaaatagaaattgtcatgaactttaattaaatgagagttaatcagagctcccatttattgagagtaagaattataatatacctaaaatttcttgggggaaaacaatgaataaaaatagccaagacaaaaaattaatagaaaagcttcactttgaaaataaatatgtacttaagatggaattttttctgtacttagagttcaaatttaaatgttcatgtaaaactgaagtgatataacctcaatgtcatagatgttgctacagacccacatcccttgcaaagatatgtacacttatttcttgaatgatatgttgccctttggtaagtattctctaattatcgacatgtgactttaataaacattgtgccagtctttaaaagtacataccttggccgggtgcggtggctcacacctgtcatcccagcactttgggaggccaaggcgggtggatcacgaggtcaggagattgaaaccatcctggctaacacagtgaaaccccgtctctactaaaaatacaaaaaattagccgggtgtggtggcgggtgcctgtagtcccagctactcgggaggctgagtcaggagaatggcgtgaacccagaaggcggggcttgcagtgagccgagatcgcgccactgcactccagcctgggtgacagagcgagactccgtctcaaaaaaaaaaaagtacataccttgacaacttataagaacaagaaataagagcaagraaatattagaaaatctgtaatttgtgtatatatacaaaatatacttcatcttatgcttatttcccaacttggcrttagaaataagtatccaaggtacttctgttttctctgttttgtcttgttttttctacttggaaactaatactcaaagaccttgagccttatttaaaggcratctacttactatacactatatctaatggaaaggttaaaacatttgtgatgataaataacccaagctactagctacattcctttaaatcgttaagaaaacgagatacttcaaagttagtgtcttaaagaaaggttttttacaggtaactcctttccattatgagattatgccaacttatttttgaaattaaatccctatatagatacaaggaaaaattggaaaggttggattttaatatcataaagaaattttaaaatttctcattgtttatttacataaatctgtttgactattttcttttagtctctttcttccttcctttcttcttcaatgacttctaagtcagtattagaaggaaagggagatattgtgccaagagtctgaaatgatactttccatgagataatatatatgataaaaaacaagaactattgctgcagattgtttttatgcaaaaaaaattagaaatgacagactttgtaaaaaatacagacactgactttagatgatttatttaaaccataaatatttcaaactgatctttagatatcaactttgattkaaaaatagtttttttaatttgcaatgacaaagtgtaaatttgcaatctaatcttcagtgcatatatttttataaaacaagatgagtcaaagtataattatttttcaatttttattcaaaaacattgttttgtgtctttttcaataraaatattttatgattttccattaacttaggctgaaccattcagttactcaacacttatgtattgaccatctactatgtcccagaaactgtaaaagacataggaacaaatgatgtacagtaaatttcctgtaaaccaktaaccacgaattaatcatacagcatcacaactggcaggaacagtgacaacattctaaaagggaaacttgaaagcaaagcacactttttttaaaaaagaattaagatgaattattaattcagtttcagttaatatgtgtacatatctatatgcataaacaaatatatagactgaaatacaacatatataggtatggtatatttcaaatgattaaatttttctaaaccttgtaattgtgaatattctcaaaatcagtttatattgaaactttttttttattatactttatgttttagggtacacgtgcacaatgtgcaggttagttacatatgtatacatgtgccatgttggtgtgctacacccattaactcgtcatttaacattaggtatatctcctaatgctatccctcccccctccccccaccccacaccaggccctggtgtgtgatgttccccttcctgtgtccatgttttctcattgttcaattcccacctatgagtgagaacatgyggtgtttggtttttttgtcyttgtgatagtttgctgagaatgatggtttccagcttcatccatgtccctacaaaagacatgaactcatcattttttatggctgcagagtattccatggtgtatggtgtatatgtgccacattttcttaatccagtctaccattgttggacatttgggttggttccaagtctttgctattgtgaatagtgccgcagtaaacatacatgtgcatgtgtctttatagcagcatgatttataatcctttgggtatatacccagtaatgggattgctaggtcaaatggtatttctagttctagatccctgaggaatcgccacactgacttccacaatggttgaactagtttacagtcccaccaacagcgtaaaagtgttcttatttctccacatcctctccagcacctgttgtttcctgactttttaatgatcgccattctaactggtgtgaaatgatatctcattatggttttgatttgcatttctctgatggccagtgatgatgagcattttttcacgtgtcttttggctgcataaatgtcttcttttaagaagtgtctgttcatatccttcacccactttttgatggggttgtttatttttttcttgtaaatttgtttgagttcattgtagattctggatgttagccctttgtcagatgagtagattgcaaaaattttctcccattctgtaggttgcctrttcactctgatggtagtttcttttgctgtgcagaagctctttagtttaattagatcccatttgtcaattttggcttttgttgccattgcttttggttcaaagagaataaaatacctaggaatccaacttacaagggacgtgaaggacctcttcaaggagaactacaaaccactgctcaaagaaataaaggagaatacaaacaaatggaagagcattccatgctcatgggtaggaagaatcaatatcgtgaaaatggccatactgcccaaggtaatttatagattcaatgccatccccatcaagctaccaatgactttcttcacagaattggaaaaaactactctaaagttcatatggaaccaaaaaagagcccgcattgccaagtcaatcctaagccaaaagaacaaagctggagacatcacgctacctgacttcaaactatactacaaggctacagtaaccaaaacaggatggtactggtaccaaaacagagatatagatcaatgggacagaacagagccctcagaaataatgccacatatctacaaccatctgatctttgacaaacctgacaaaaacaagcaatggggaaaggattccctgtttaataaatggtgctgggaaaactggctagtcatatgyagaaagctgaaactggatcccttccttacaccttataccaaaattaattcaagttggattaaaagacttaaatgttagacctaaaaccataaaaaccctagaagaaaacctaggcaataccattcaggacataggcatgggcaaggacttcatgtctgaaacaccaaaagcaatggcaacaaaagccaaaattgacaaatatattgaaacatttaatgccatgtttctcagagtgtgacccacaaaatgttgctgatacaaaatgatataagtattttcttagctatctttcttcyttttaaaacagaacagctgaaactgggtaatttataagagacaaaattcatttattatatttctggtgtctgggaagtccaaagtcaagggggtgcatctggtgagagctgaaggcagcacagtgtatcccatggcaaggagactgacagtgctaacatgctagctcaggtctctcttcctcttataaagccacgagttcccttccrtgataacccattaatccattcatgagggcagagcctttatgatccaatcagctcttaaacccyccacctctcaatactgctacattagagattaagtttcaacatgagttttcaaggggacattaaaaccataccaagtttagaaactgaaagtaaggtgtttacaaacttttacaaaaatttaataaaatccttttatgtctgttgaagctaataacaaaaacagaaaactattctgtatgtttttgcttttaaattttatttctagaatttgtttgtattgtgtttaccaaaaaatggtttgtaatamatttattttttttaaattctgagaaaaactgagtttttaaaaagttttaaatgtgaattctaatgagaaattaaaggagattttgccttttattagtagaactctgtaaaatctgtgaatactaaaatccttcattaactggtgccaacatttttccaaaggagtttctaattcttaaatattgttcagtggattgagataatcaatcktaatcaacagtaaaaagaaaataaagtactgatttatttcagttctctaattcaaaataggattaatatatgcaaattttgttcaataagagttttatctcttatttctatttatatttataggaatgatgcaaacttgtagacattttaatatatatgagatagtccatgaagactttcagaaataagcaggtatgactttaaaaaattgaagkttatgtgagttgatgagagacaggtagaagaatatagcttcttcaactattagtatattatatacatattagtaattctcttttatttaaatgaccttacaatcatataaaaaagctcatgttaaaagagcactattgtatttttatttgtctgtgcagtgtttacaaaggagtctgtcctgttcaatgtgtttaagagtgaataattttgtttaaggtgaaatgttgctatccagctgttacagctttttacaaagcctttgtaggagcatgtgcattctgaagattgtaaagatttatcgaatagactcaaatatttttcagaatatatttgtctcttgtaatttctatttttttatggtgtccagcctgggagtttaaaaaatggaaagataggataatagttttaaaagcagtaaatattcttccagctgtctctaatcaattcacatacctycaattctttaaagtcacactttcttatttctaaaaagcttcagggactatcttatatattcttagaaatacatattgaatttttcattttcacttcattcattctttctccagtttctgtgctggcacttttagatgatgtgctggcacttttagatgatgttatatgctggggcttcaggaaccctgggaattcagaaatgcctgtgaaggtgtatttttgtttcactgttgttgccactactataactgataacagtagcaaatcctgtggatactacctgaagtcattttgtggcaaagctgaaccccctgaaacttctctaatcagtaagaactagmacactgtgccaaggacagcaggatgttttgcagagagaaatacccactgcactgagctaagaagggagaaatcctttctctgtgccacactgttgcagtggaacccaaattgtgttttctgttcctggtaggtaatcatgtgtattaaaraatcttattctgtttttaattttactctgtataggggtgtgtgtatgtgtgtgtttggttttgattttgtctgcttgtttatttttaattcacaagctttcattttcctgggaacacagcctaaactcactgaggattgggctagatgaagagggatgaacaatctgaataacaaacacaagacagccttttgctggggcagtttcagtgcactgtgcttgtgctttgactttccactggtttacttgttagtatcctgtaaattgaccatggaaggctaaacacattctgcatcttagggtgttcacacattaggtacaagatgaaattgttacacatgcaagcatttcttggaatatcatttgctaaaaggaacatgcatgacacctaaaacttgcttttatgctttacactgcagacatataaattatagatgataataaactttgccattgttccttttctctcctgtttctctgtagttgtcctttttctcctatgtccattgtttaggtctcctattatggtttctcctcactgaagaataataaagtaatcagacgtatttggccttaataaattgaagcgctaaaggagctggaattgaaaaatcatgttttaaatcattccttgaagttaactttactgtttttctaagtgtcagtgaattttcaacatttcatgaaactctattctcttgttgtctagtaatattcatggtcttatgattccatcattataccaaactactttgaaatatgtgactagaaacacattttaaatcatgagatgttccaaatccatgaggacttttttcttggaggtaagaaaataaaatctttggttttctatacacgggatagcaagttgaactgatctgattattcttcaattaaacttcattaggtaccattttagcacttattctgtaagtacttttgagttaatagcttagtgtaaagtgtaaaaggctattaagcagatttaaacagttttgtttaaaggaagaagccatgtttttgcatcccattagctgaaaggtattaataaaaggtatggcttattaggcagtgaagataaaaactggatgcatttacgtaaatgggaaagctccaggcttggcatgaagcctgtagacaaattacagttttaaattcaatgtaaaattttctattattttaaaaataatttttaaaacaaaaatttttaaacagaattatgaataagagcagattattttctcttcatgttattgctagaagggtagtgtttaaacaagtgttattagtaactacccatgtagaactgggcaagatcaaagagggctgccaggtaaaatggaggatgctccaagttaagttttaatttcagataaacaaataatattttaatataactatgtcccatagaagatagttatactgaaaatatccattggttgtctacaattctaatttagtcaccacatcttccatttttatttactagacacataatcctaaaattaggaataagggagataatcacataagtaatgactaatgaaccttgttagttaacttagttaattgggtttttttttacttttttcattaagaaaattgcaattattttcaagatatcataacaggtcgtgcatatgcagaataaaatgcatgttaaatgtctttgtgctctagtttttccatcaataaagacagtatatatgtttcaaaagactacttttatatctatactgatgaagtgaaatgtctttttggggcacagtaaatataatttgggctacctgtcattctcacagccctatttttaccctgaaggtgagataagcttcggtagcaatgttgtggcatttataactctccttcccactccaaacacagcattctcatttagccacagctggtggatcagggtttacttctaattttagtgaggcatattgcctttggagtttgctattgtattagaaggaaccaggccctgttttctttagtgattggacctgtgtttagtcctggaaagagtcaatatacatgtcaaaccacatacaaaccaaattgtgcagagggagaaacaactatattgtcagaaatagcttgaatacattctgtccgttataactctgttgcaatgtcattctgctgaatatattctaatcattgtaattgcatccattatagttaggacatggaaaagaaaaaagaagagggggtaagagaaactacaatatgtataaattcagcarcaacacactaatgatgtattagagtaaactttataattgaacatacttgtatttgtcatagctaaaaccttcaacttctgtacttgtatatccaaaatttatatgtagtatgttttatgtacatataaaaatatagatacgtatttatgttaagatatacaatgtatatctacaataatcttgtatttaaaaaattaacatttcatatacttatcagaatgaagtgctcttctcatccattatttagaaataaaatatactgcccttatatattggcattctaagttggctagagtttggagctgatgagatcaaatcatatgttcatgtgtttattaacctttgaaatgatcaagtttaaggggggaatattgctgaattagcatgttttactactggtgcaaaataactcaaaggacacatcttactgccgttagaccagttactatttgctaacaaaagagagagtaattttattatctgtggacattgatatgtaatacttaccaagcatgccaataaataatrttttgaatgaaatagagcatgacataatgaatattagcaatacaatttttattgagtcaaataatgctccactaatgaacaaaagtaatctacttgtttctttagwgmttgttaacagttccttgattattcatgtgtccagaaaaaaaaaaattaatgctcgaagccctaaacctggtgaatataataagcatgactccccatggatctgaaaaaattaaattgttggtttgagacagatgcagtcataaccagagggaatgcttttgcatccacattacaatgtagcagaaacataatttagaagctttaatacatattaatactttgttcaagacaattataagcttcagcaaataaaaagtaaagatacaggagaagaatgaagttactttgaactaaaatctcctctaaagacagtcgtagtcgtacagtaattccaccattaattttagtatatgaactaaagctagaataaaattatatgtaaatgcattgaataaattcaaaacaagctcaggaaaaagagtatagagtgatcctcttcatagaaatcaaatgaaatgactgtgaatctgctagtcatagttatctgagtttttttctcattaaatagattcatatttctgctctcaaaagtaattatttccttggaatctgtttgatacataatagtaattctaatgcagtacttatcgttcggtttttttttttacataaaaatacatgaacgtgtaaaagatactttgttgatgaaattatatactsgaggcaaaactatgctacaagagaatcatttcaaaacaagtaagcacatgttaaatgctagatactagaaataatctacccaaatactttttgaaaagcagggggaatgagatctccattcagtgaatttactacatgctttctctatgctggtagtgtgttctaagggccttataacaaccatgaaagttatcctcattttaaaaacgggtgtgtccatgacctgcctaagtcttgtcatgatttgggattacatgacctgtttttcaaagtcatagaagaactaataattataaaggtcagagttagaacatcccagcctgctccttaatagttgtacattcttaagtaggttacctaatttatatttgcctcagtttttcattctgtaaagtaaaaataataattatgtctacatcaatgagctgttctggtgattaaatcaattaatatatatataaagcatttagaacagtactgtaagttctatttaaatggataagtctctagatccatgtttgttttaccacactgcaaaagcatgggcattaaattcacactgctaacaatgtacaaaatgtaccactaaaatattgtagctttrtattgattgattcattgccttctgcaatatttactgtatttttgaacttgatatttcttatctattaawcattaattaaaaataataaaaacaagtcataaagggtataataattgttattatggtacaatcattattactgctacctgttttttcacataaaatgtaagccattaattgttgtaagcaacccaccagagaacacatagaaaattgcagaattgggaattacagtttatgaaatwtttttttaaaaagccagaaaaccacattatcaatataatagggaaaaccaaagatgaaaaatgtaaattggttgaagaagttaatcgagatgccaacattgtccaaatgaacactggcgatgatggaaatattccatatttactgtattcaatataaaaactacaagcacacatagctattgagcacttgaaatgtgaatattgtgactaagggattgcattttgagtcttattctgttttaatttaaatctaactaactacctgtggctattggacagcacagctctggrcagacagtaaaagagagctgatgccggyctggaggatgagagagctgtggaggcaggactcatgagagagggtctttggtcattcatttctgtggaaaataagtgaccttttcaatctatgatgaaaaagggaacaggagtttggtaaactaaaactaagaagaatttgcagaggtttcaaacaaattggttttgggccatattgggtccattgtacaatgcaaaaatgtatatagaaacctcaatttctagtttctctgattaaaaaaaaagaaccaaatggagcaaattaattcatctcttttttttcatctgtaaatccaaawgctgtrtgaaaakctgtataaattaaatttaaattaatattccattctgaaagtctactttagggtttatgatcacacattactctgttagacctcttttggtatctggttagtcacagtttttasagcagtggtctaataccttcatggtcacaccttctgtcttcagaaagttcatttagtttcagactgttagccagacatcttacaaatatttcccattgcttacagggaaaatgagaagcaaaagcatatttctatgtgaaagtgtttttgttttgggaaaagtgaagttgcggatatttttcactgtggctcattatatgatgttcacgtttaggcagtatacaaaataagtcggactattacagatgtcactgcctggatgagcttgattttgatataaaacctgtaattaatttttcacataattgttcatagccttaagcttacaaatttattaggttatcttgggataaagtcttcttctgatacaatgcctggaatactccctttgtcctacatggatgagygctttactcctaaatagtactttatgatctgggtctactgtagcacaaggaaacacatgtttgaaaataaacatttagttaatgaatggattttattttcaaggtgtttattccctctggtgactgatatataacaaggacttacaaatgcttattcaataaaagctccctaaaacttagacataatgtttgcaataagcatagtaaatagcaaacctttcatataaaaatcgtctaagtttcactttggtttgactatatttttctgtggggcgcttaaaaatgtagatccattgaagtcttttaggccacttctctcttatggataatttcagcactatttttttcttcagaattacctggttttctgagaattaaattttcttttgcagttacataaattctgtaaggatttacaataccacagattgtttatagcagtattttgtaaatgactacattataacatagagatattttggtagtatataatatcaaataaatgaatcattaaaacatatgtctgctgtaaaaatttatctttcaccacaaattcattcatgtgtcatatagacattttttcctaatatttcctaatgttttttaatcttgattaatgttgcattctaagtaacagtgattacttctgagtcataaatattttaaaagctattttgtcacttcaaccagctctgacttcatactcccaccttaatgcactatattctagaacagtatttgttaaagaacaattgtctagaaaggaaaaaaaaaatgtgmttttttgcataactytrcatattgttttaataatatacttccattagttctcttgcctttatattacttacatgttatacatttcttcaaataattttactgtgggggcgaatatgttaacatgcattttttggtatcaacagcatttttgatgaatcagataatcctagaataatgtctaacccatctacattttatcatgctagaataaataattcaaggaaaattgaagcatcatttgtactctcaatagcattctagtagtctaggaaaactaagtgaaaactacaaaaaaggagaaaaaggaaacgatgtacatcacagtgttacaatgcagcactagcaacgtgtacgattgcagaaaaaggacagatttatcctgactttgaaaagcaagaaataatttaagggcaagtggcattcttgtcagacttcaattaacaaataggattttgatagataggaaggaacactgaccaagaagttaagtagagtcaactgctgaatgtttaaagtaataactggatttgattgcaggaaatagggagatactgaagatttttactttatggggaatagggattatatttcttaattgttattaagagttgtagtttctaagactttaatatgcagcagaattgcctggaaggcattttaaaatatagattacttgggcccaaccccagagtttctgattcagtaagtcttgaatggggcctgagaatttgcttttctaactggtttccagatgatgccagtgtaggtagcttgggaccacacttggtgaactactgatctagagcaagacttctttggtagttccttccacctccctgggaatggtgtcaaataatatttagctttcattttttagcagttaacttgtattttgaaacactctgtgagagacgaacataggagaaaatacatacaaataaacaaaaaaaaaactttaattaagtaaatgagacaaattaaggtaatactggaaactgtaagtaatactattctacctgtatcagtcagggtcctggcacgaaatagaatacacacagatggtttaaataaagatattctcatgaagacattgttacagaaatatggacagagttggggcagctggaagccagtgacacccagcgggcacagtgtaatcagagcccatgtggagctggagtcatggagaggctgaccagtgaaaaggagctggaattttcttagagggatgcagtgactttcagagaagtattgcagcagggaaaaagggtagaaggaaatatcccacttctctcttcctttgcactccagtctcctgctgttgcctccttctgtctgaaaccagcctgaagtcagtgtatatgtgggtgagacagccagcagtgtggtcagtgtctgggggcacagataacttcttggaaagatgaagattgtaaaggatggacctcattctactttttatcttgttcattttaagccctgctcccagttttctactcamgctatcatgacctgtcatttctactstgtgccacaggatagcaacaggctaagcatctagcagcacggagatgagatgagcaatctgttstaatagcttacttactacggactcagaagtgtctttaaagcttcttcatcagtaggtcaaagaacttcaaatatttctgctacagcagcaccgtaaggagaagtacttgtaactcaaaagtgctattaaaagcctgatgtttgctctaaatataaggaatataatgattgaccaattcaagctgcacagagacaatttgctttttttgagttgcctctaagtccctggtgatgttattgtataaataccaacaaggcaataagagctcaattgtcccaccatcaaagaggaagcaccctttggaattggttttaaataactgtaggtagttcagtgctataaataccagcactattttataaatctcagtcacaaacatgagattgcctttactgtctcaatcattttaggatctcttcctgtagtctctgcagaatttctgaagcaagagcagaggctgtattcattgcctggcaatagcagtgaatgatgtcttacattcaagatgataggaggatcctaaatgtcttcctagccttaagtcctatgacttttcagtatgcaccgtcagttcaggctaactaagtaaatcactttttacccaaaatgccacttgtttacttcacgctgcacttttgttcatgtaatttgtttcattgagactacctttttaaattgttaaaatatgtaaagcttcatctcaaatactaatctttccacaaatcctagcttgattcttccaatgagaagcttgaatatccagagcacaagttgttacttttaaaccactttacacatccttaattatatttaaaaataactaaaaatttcatacaccccccccaattgaagcactttttactatttattggagcgaattatggagaaatatttgtatgagccttggccatggaatatcagaatagctgtgtgtgtctataagttacttaatttagaatcatttatatcactctagtttcatctgtaaaatgattagtatctaacttacatcaagatgttgatgttcaaatgtataaaggatgaggaaaacaagttgaaaagcaggctaaaaatgttagttacaattccttattattttttgtgtcttttacatggtaggaaatcaaaaagtttgtattatattgaactaaattggaagtccacagaaatctatactgggattaaaaatccttaattcttttaattgcatgaaaaagagaggggagaaatagcttgacattttcttcatgatgacaaagcctgggcaaaacacatgtatgtgcatgcatttatgtatgtgaggcttgtttcaaaaagggttttttaaatgttttctataagtgtataagaaatatcaaggtatactaacataagactgaagtgatgggacacagtggtcaaagataaaataagaaatagaagtgagataaaataagaatttcaattaatatacttcaaatatgtcataagaatgtcatcatttgctagaatttgaccaaaagattagtattaaacattcatggaactgaaataaagctttatttcagatctaggatcccccaaaatattatgggagtcacatacaagaaagaaaagatgaattggtcatgagaaacacaaatatttctggaactgagtccagagaaaaaaaatcatcctttggtctctttaagaaaatgatgtatcttaatgtggtgaacagtgacattcttagagtaaatgcacagtgtagttgaatattttcctccataaaactgaagggcactgtgccaaagcacagctctgaaagcttatgccactggggattattatcgcggaaatctctgtggtgtggattgttgggatggaggggctacagggtacttctctttttatttacagatttcatattttaaaaaatttttacaatataaaacatggcttctatctttttttaaaaaaagctagcaccccacatcaaatcaaaacaaaaaagcaaagtagtaggtaattttgggttttctaaacagccaactcaatgtttatacttgatcttagccaaaaggctgagaagcgatccaactcaatgtttaattgtgggtttcatattttcaggtatagatcactgattcccaaactkctgattacaactcactcctaaaacgccacaaaataaggatttaataataaaaacatttcagaaatgcaacctttgtatgttttcttggtaattctcattgcagagacatcaccacttggctggctattctagtagttctggcacctgtaaactgtggtggtaaaaagtcatttgggagtttaactcacaggagtcggatgtgggcaggatgccccttctaaggggtatctgaaaatatgtttgtgtgaagcagatgcttcattgtcaaagattcaataatcactgatatttagtgagctgaggacagagatgctaaaagtgctacagtatatgagacaatttcaagaaacaaaagatccaactgcataagataccaaccttccctcattgaaaaacattgttcataacaaacttacttggcatgaaacagtattttgtaacattcttatttacataggaatgtaagtaagattgtttcaaaattaatttgatgattaattttgtgattatttcaaaattaatatttttctttaaatctataaattctaatgttcatctttctttttgatattctgctcaatatcttaaagatatattaaagtcaatgtgtccaaagtagaactccagactcctactccctgccaaactgctacttccccaaatcagaatattgtacattttggtaaatggaactaccagccattcatttgttcaagacagaaaccacgatcctaaatttgtgtcattccaccttcaaaatatagtagtctcattttatttcccraactgtgaaaggtaaaaacctaaagtgagggtataatataaacataaaaccagaaatattaaaaatagatacatttttcctttaaaggaacagaaaaatgtcttagaatggaaataaaaaataaggagttagataaatggagatcaaaatttaaagaaatggagggtgaactatagtgggaaaataggtcaggtgcaatggctcatgcctgtgattccaacactttgagagacccaggcaggtgggtcagttgaggtcaggagttcgagaccagtctggccaacatggtgaaacccgtgtctactaaaaatacaaaaattagccaggggtggtggtggaggcctgtaatctcgctactcaggaggctcaggtgggagaatcacttgaacccgggaaggggagtttgcagtgactggagatcgtgtcactgcaccccagcctgggcaacagagtgagactctgtctcaaaaataaataaatgaataactaaatagttggaaaataaactgatgcctgaactgctagaatagccagacaagtggtggtgtctctgcattgtcttttcatactgctcttcccttctgtcccccaacacacaatctttgtgtctttctatctctgtcacacacacacacacacacayacacatacayacacacacacacacacacatagatgctccttagcttagagtcaggcttctggccccacctgggatctgtgaccctgaagaaaagtagcagatacaaggttgtctctggtgagcaggagtctctcagcaaagcctttcccctktcctccttctctaagaaatctcagatgtagctggagcaaattcaacttttgggattggaggacaaagcaatctattttctgatagattgtatttatttttaattgtgttccactttarcctttgttttagcactaatcttttcttatcgagcaccttgttatagatatttctacttttccttcttctctctccttcctactttgtaattcccctcttattttaayctatttcaacatttctgtgatgttttttgtatttgccataaaaatgaaagaaagataactccacggagaaagatttgtgtgcatatttaaatatgtatctatatatcttttaatctattcatttattttttaaaaatatttgatggaaataattataatttatttaataaataactacagaatatctatatttagtaggaaaatggaaattttagaatgatacttttataatgaatcaatttttctgaaacatacatatgcatatacaacagacatatctctggatagtaaaaatatgaaaaattttttttcttaaactattctgtatacatatcatatttacaatgaatatacattgcttttgtaattaagagaccaaatgaatatatttcaatacttcagctcttaatttgtgggcctgacaactatatcatagagataacgtcaattgaaaggtaccctgtccacaagagtttctttaccagccaggcagagacccaaatgctagcattgacataacagaggaattaattgcttctgtgtacatgagcagtaagtactgactgtccttgttaaacatctgaagtttattgctggtgtaataaattttcattacatttcatttatagtaaagaaatattagtcaagtatgaaacattgctaatttgaatcctctataaatgaaagatgacacaatgtttcctaaagtgcttgaaaaaaatatataattaagtgaggggttcaaaaccctagctaatgttccttaaccaaggctacaaataaacaattagcaaaatattttaaaaatacaaagaaataaaaagattcatgtgaaaacagtaaaattcttaaaaatatacccttgrtttcagaggtggttgaagtaatttattgtccccattaagttggatgaataaagaacaaaatattgtaaacaacaattaattttaatgacatgaagatgatcayggatcctggacttgatattccaatctaagtatttcttttaatcttggattagcacttgatttggttaaaacattgttggattacctcacataaagtaagacagattcattcttgcatatttcccccctttttattcaaagtttattgtataaattctatgttcttcactcaaatcatgatatgaaatgaaaatgtagatgacataggagtcatattttattaagggagtgaagggaaaggtagaatttaaatatcttgcagtggccagaaagaggacacagtaaaactacaagtagaactggccaaaaggcaaccctgaagaaatgttaggttgatcagtgaaccctaaacaggctaattttaagaatgtttgcagccttaaaaattatgattcttagtttcttttgagaatcatttacatattccttttttgaattttttatcttttaaaacagggtctcactctgcacccaggctggagtgcagtggmacaatcatagctcactgcagcctcaaccacttggctcaagcratcctcccacctaagcctcctgagtatctgggactaaggcatgtgccaccatgtccaactttttctttctttctttctttctttttttttttatggagacagggtctcactatgttgcccaggctggtctcaaactcttgtgctcaagtgatcctcccacctctgcctcccaaagtgctgagattatagtcatgagccactgcacccagctcatttccatattctttaagcccaacatgggatcatgttctgtgaaaaagttatagtagtatacaacattgtgttttttttcttattatgtgttctggctgtctctccaataccagtaaattatggctatctttccaatatcagtaaattaagcctaccttgttctttctaatagctgtgtaatagataattgaatggaaatggtaaaattgtatttgactggtcccttatttttgacaatttaggttgttgccatttggctactatattttaaatgctgaaaaaatgtatgtgtgtttatatacatacatacacatatatatttataatgagtatatgtatgtatagatctaaaatgtgtatatatatgagtatctttctgtaaaaaattttttaatgtagaattatatatgtatatataatatccacrtatgtgatatatatacacacacacacatacacgtaacatatttgagcaattgtatctataaggacagttattaaaggtggaactactatgctgaagagtatgcatacttcaaaatttggaaaatatttacatattcaatttagtcacctctgtttgttgtcatgtgtagaaaggcctgctttactcccaaaattcaaagaaataaacaaaaaactctattctaatatttaatgactccaatttatatgtttgattctttgaagcaggttgaatttattagagacaaagcaataagggagtaatacagatttacagtgagaaaatcaaggcttaaatagctacatamtactttctcatggtcatgagtctccagatacctwttaaggtaacataaatgctgtgtctgagaatatcttaagcacaaatgacatatttttaaaaataatagccttaatattttccatgaaatttctatgttctagatattttggttgttcatttatcctggccctttaatttaaaaatgtgaaataattcataaaagaaactttatctttttggaattaatgatttttgagacatagataataaagtgatagccaaataataatattccttaaaggagacaaagataactgatgatttgactcaccagaaacagctaatatttttgtaccaaacactctatactgagtgtatattgtgggaaaggatattatcctaaatcatattgaaaatattggcagagtctagaatctaaagaaggaaaaggcatcctatgtagaagggagagtcatagataatgtttgagacatttgcacaaaagatgtgcaagccaggctgtgttgaggctcatcagtgggatgtttagagcagacaactgataggccagtccagtagaataaaataacccaagattttcaaacaggaaaccaaacatattcaggagaaactgatttactgtcctgggagaaacagataattcacagaaggacataaaacaaggaactcaggatggagccacattcctgagagttttcactgatagttttgccctttctacctgggagctcctaaaggtatttaaaagrgatgagagacatatttttaaaaagctttatttggaggggaataaagtgttatcaatgaagttcaaatgtataaaagatgatgaaacttagcaaatggaaaaattgactgtgtttgttacaaatctttattattatttttagcrtcttttacagggtaggaaataaaaagttgtattatattaactaaattggaaattcacagaaatctatattggaatttaaaattcttaattttaaaagactaaaaatgtagtatcaggtggactaggggagatgagggggaggaatcaggaaagcaatgggctttgttacacaatttttcttttgtgtggcaccatcagtcatgacataagtcccaggttctcatccctgacttagaaggtttttacacatatcatttgaattttatttaaagagctgattgatgctttgtctgtactgttctcccacacattatccattttggtcagtgacagttcaaccatcttagaaatggcaaattatgtaagaaaatctcctgtgttctagattactttttgtttttcctctatgagctagcattgctttgtgggttacattagagaaagaaactctgaaaaacattttctttatttccratactttgttttaactatggaaaagacatgcatcacttggagataattagaagcaaagaatccccgtgactgtacaacagatccccaggtatggacaatgccattgcctgcagtatttgaatttgacatgacagctaccaggtgttacaggcttaccggttttcaaagtaaaagaaaaaaaaatgtaagcaccttcacaaatgaaacagaacagattttgccagcataaaatacctggcttacatttcaacaaagtcaattccagcccttttaactaaggcacaacaacctgtttcagtacacatgaattataatgctgccaaatcttctgtcctcagaaataactcacatgtgcttcaggtacttgaaaagcattgtggatttttgccaagctcctgaggatgcgcagacattgtttgactgatcgcaatgtcacatctgaggtccacttgttagttcttagtttatcagaaactaagcttttgaaactatccatggtcttccttttgatgtgttcattaagctttttagtcattcagttataaaatctaacctggaagaatgaacaagatattgtctcgtttttatggtggtttttgtttgtgatatggtttggctgtgtccccacccaaaatctcatcttgaattgtaatccccaaaaaccccatgtgccaagggacagaccaggtggaggtaattgaatcattggtgtggttttccccatgatgttcttgttatagcaagtgagttctcacgaggtctgttggctttataagtgtttggtagtgcatccagcgttcattcgccttcctgctgccttgtgaaggaggtgccttcattccccttctaccaggattgtaagtttcctgaggcctccccagccattcggagttgaactgtgagtcaattaaacctctttccttaataaattgcccagtctcgggcrgttctttatagcagtatgaaaacagactaatatagtttgcttttacaaagtattttttawgggtaaaattaattgtatgtctccttatttagtttatcaaagyaggtctgtgcatacattaatgaaggtatacaggtaattctggtctttcactaatattcagtacataatcttccatctaaaatctgcttttttcttctgtgttgctacgttagtaaatgttcccattttctaactagttgttctgcaagaaacaggattctcaggaattttttgttgataatacaactttttaaaatttttatcaccaatagaagaatgaatttccagcagtcaggaatctaacacattacaggggggaaaaagtacgtgaaaagtggtagggggaaattaacaaatgatcttgaaaaatctatggcggctagcaaagtattcttgaaaacaaagatctctgcattccggtattttagggatcctcaaaaacaaaatgaaaaccaaaccatctggttttgcccaatcatcagaaagcaaaataatcttgcctacattcagccacccccataatattatacagagctctcaagtagctttctgtggcataatcattaaatgtgttttggagtatcatccactatttgagatcagaaagcaacatgaaaacaaaagcccaaagaaataactttaaaaacaccaaaacraacaaagagaaaaaaacaaagaaaataaaaataataacttaaaaacaacttttagttagtatttatctaattacagtcctgatgataaggcattcactaaaaaaagaaatgttattatgaaaataatcatagaaaaataaaaaatatcttaaaaatcaataataaaactccccaaattattctttagaaggttgaaagtgaaaaactctcctcctagaaagaacaaaagagaaagaagcaattagagataatacaaattaagcagaatataatccagcagggtccatttcttatccctagaattgacagtgttcagattgataggcccaaccaaatgcacagtccacatacaaatatataattttaaatttgcagaaagtaaaacatatagagcrtccataagagggaaaaattattcacctgaaaaaaacaaggataacgctaactagcatcagccttctttttttttttttttttttttttgaggcggagtcttgctgtgtctctggaggctggagtgcagtggtgtgatctcagctcactgcaacctccacttcccgggttcatgcgattctcctgcctcagcctcccgagtaactgggatcacaggcatgtgccaccatgcccagctaattttatttttagtagagacggggttttgccctgttggccaggttagtctcaaacccctgacctcaggtgatctgccctcctcagcttcccaaagtgctgggatgacagtcgtgagcaaccacgcctggctcagacttcttatggaaaagctggattcaagaagacagtggacaagatggttaaagttctggggaaatattataactaatctagaattctatacccatgtaaactatcaatgtgtgagtcaaataaagactttatacatacaaagacccaggtgtttacctccaacacatgtttactaaagaaaccactagtgaaatgaaggataaaacaaggaaaaagtgtgtggggtctgggcaaaaatgaaactatttggttatgcaattctatctaaggtwaaatcccagcacttgccttaaaaaccatctaattcataatggaggcagagacttctggaaaggaggactccgggaaagaaacatgaatgatakaattgctacaattcaaagatatacagagaaaataggtgaaagcatttgaaatctactttagaaatattattctttgaatagcatagtagtcatgacagtgcctacagaggaggaaatataatcctacagatttttggctttgcagcgcacaaaatgttcataattacacttatccaacttttataattcatgtatagacaaatcaataaagacttaactatgatttatcttgacctacatgatcctgcagtttctagccttcccttcatccagcctcattttgtgcagactgctccactatcccaatacattttaattcaggttggtctgtcaatttctcatacacatccatttcatccacatcagtttctcatatcctccatctcagggccttttacacaagtttttctatttgcctggaattactttacctcatctcccaacctactcccaatccctgtcagatttttcagataaacctgccctactttacctcaccaggttagatccacctgtacatctcatcaaagcacctgagacataataagtaatcaagaagtctttgttcatcatatgaataagtgctatttttcttgcatataattctccctgtccgaaatgcttgatatttctttattaaagagttcaacatttaatttataaacttgcctatgtgtcttgtctgttttgtaatctttagtatcttgctcagaaaagaacttattggctctacctcttgatctgtagcatgtattatattactctttattggacatgcctaggttgtaggcaggggagacagagggttgtatcttatayatataaacctagaacagtgccctatagctagaaaataaccagctctagtttttggtaaaatacctatgtgggtattcayactcatcttgaaattattttaccacttgtaaatgcagcagtcactgagccagatccttttyaacttctaagtctgtcaagtaaaattcttgaataaattttaaaaatttagttgttaaaatagatttattaatatgtgaaaatgttctcttgatttaatgttatatactttatgaaataaataaaaattcctttgtgttttatgtaatctcaagtgtcttagaaaagatttggcatatttttgtagattttatgcattttcacaattaggtttctgtttttacaatagagatattgcctgcatacacaattcttcattatcccttaacaataactagtgtttattcatataaaatatcaaattaaaacttcattattctgcagacatggagcacctggaaaaaaatctgcatgacataaaaataaaaacagataaaacattattattatggaaatatttggtgtatctctattccataatcctccatagtatctacaattataatgagattctttgatagatataattctttttaaaactcctataaagtagcttttaatatattgggtcttttcaatttgttttcattatatagttagacaagataaaaataatgcaaaatcttggggtataattttcacatgcatccgtgtgaagagaccaccaaacaggctttgtgtgagcaataaagctttttaatcacctgggtgcaggtgggctgagtcagaaaagagagtcagcaaagggagataggggtggggctgttttacaggatttgggtagataatggaaaattacagtcaaagggggttctctggccggcaggggcaggggtcacaaggtgctcaatgggggagcttctgagccaggagaaggaatttcacaaggtaatgtcatcagttaaggcaggaaccggccattttcacttattttgtgattcttcacttgcttcaggccatctggatgtatatgtgcaggcttgggctcagaggcctgacaataataaaaactgacacttgcaaatggatgagaagtctagctaaaattttttcaataactgtttgattatgtttaattacaattcaaacctaatgttgtcatcctttaatattcagctactatagtctataattaagatggaggtcttctaagtgtaacaattaatttttctatgtatgtatagtttttcatttttagaaaattcttacacttttctatggcttcataatactaagagctttcttttatttttagtaattatcagaagttaaattgaaaaattttaagttttaatcattcaaattgaactactttctgttttggagtttcttgaaacaccatttactttcttttttattgtttctttacttagatgataagattcaaatctaagtattgtgttcctgaactcacacaagaaaggtttctttctcattcacactatggatgaaccagatctctttcatattgtagttatgacaatggatatatagcttccaaagttgtgtgatacaagagggagaggataatatgttttttgttgttgttgttgttgttgttgttttgttttgggagctttttttttagatggagtcttgctctgtctccaggctggagtgcagtggcacgatctcggctcactacaacccgcacctcccaggttcaagcaattcccctgcctcagcctcccgagtagctgggactacagatgtaaacaaacatgcccagctaattttttgtattttagtagagacaggctttcagcatgttggccaagatggtctcgatctcctgatcatgtgatctaccckcctcagcctcccaaagtgctgggattacagggtgatatgtttttaactgtcaaggctaagagttgtttatatcatttacatcctaatttccactgactaaaactcagttacattccccccaaccccctcgcaacaaagtgcaaggaatgctgggaaatggggaaaagcagaggctttaacaatcttggggaccattaagaagtgagagttgcagtgagctgacttacttttcagttttataattctcacagtttgatatccaaagcatatatatatacacacacacacacatatatatatttctcaaaagcatatgtataacacatacatatatattcacctcagaatgatttccacttagcttctagctcaccattttcaatacctatttatttagatatgtatgtaaaaataaataatgtgaaaccctgaaaaataatgcttccatctctccatctctctaccacaataaagaagccatatatcttgactcagcttgatcaccacaacaaagttaatgcaaaatttatgacaaattacctattttccctcccactcactcctgactttctaccaattggattccatttctgattacttgcaattcttggctctggtttttgtatgtgattctactgctgctcctttataattagtattgtcatttagatttcagattacctctatgaacttgaatttgattcattactgacattatgggtgagatttcagtttttgatggaaagtcactagttcttattctcagaggccattttcagacgtagcaggtgtccagtgaaagaggtatttaggcatattttgaggaagcaaccaaattctttttaagccatatataaatattcgccagaaaataagttcaaatcctcaagaatcttaaagtttcttaaagtaatgtatgattttttcttttcaattaatctaaatcatacttttagcaataaacatgtatgtgttaatttttattaataaatggtaagctcttattctggttctttgagtataaatttattgtcgtataaactcctatctcaaaaaaagtccttacaagtaaaaattctattattcactcaccccaactgaaaaatcactcatataatactttattaatgatataatgccaaatactgtgtagctatttaagaggtttcattatatttcatgaatattaatttccttccaaataattaaggtaactgccagaattacttagcaagatagatggcagtgactatactattttatgtatgaaatagacatcatataagatttatatatagttatatatacacacatatatttacacatawataaaatatcaataacaactaaacaaatttccttcccttcatttttttcctctgacatttaaaaatatatttttcttctttactttttgttcctcaatttgctataatttttaaaaaacccttccaatttagtgaaagagacagtattcaatttttaaataatgtgtttttgtttataaaagtgtttcaaaacggggacttcaaatatggtaattgcacctgaaatatgatttgtattatctgatggtagagaatctatattcccatggacaggctacaatragagagaaggtttataataaatttcatacatacaatgtacattatttaataatctgatatccttctgcagagtatgattatacacactccttcactcatgatcggcatatggcttccagaaaccctactcatgatgaaatctttctgtgtttctacaattaactggcagttcaaaataaaatcatctgtgaaataagcttacattggtagagaagcaaattttcatagttatccattccaaactctctgaatgaatctcaagtacacactgcattacagtcattgaaagatcaaataatgggcttccttatgattctctgcgagttcatcccatgcttaatgatccattattggcataacaagggattagataaaaactattaatgataagactctaatattaaactaaagtctgggatacttaaggcttttaacatacttacaggatgattttaaaagactaacaattgaccttaggtgcacacaacagtaaagacatgaacaccataattgtttttcttcatattaactaggggtgactgtaattaatatttatccatttaataaacttttaaatgagaaggccaacaaaataagcaatgaagatatgttttgtttattctagggtattagtcagttttcacaatttaaccatgaatttttacaatgataataaatagaggtagtacagaaattggatctsggaataataatgcaactagttgtatcagttcaatgcacctatttgaatcctttacatgtcacatgcttgtgaatttttgccaatgatgaagccaaaaattaatttactgagtgtcacacaacaaatggtgatatcaggaattcagccatggccattcaagtccagagcctcaatttagttgaagctagtggagaaacagggcaacaaatatgaaaaggaagatttttccattttcaaaaacacgtttggtggtcattcttattttttgtttattatttttaactgagtgaagagctaaacaaaataaagataatctcaaaactgaggcagatacataaactggtgagagaacagtaatcaaattgtgtcattctttgtgggaaaatctaaatgtmatcacatctctgcacaaatgacccaaagaactcaggaactagcactgaatcattgcaatgagaaatgcctactctgggtagatgattaacaagtatcaattttatgcaattttatgaaatacttcttttaaagaggcagcattacttcatttgtaattttagaaagattttccaattttacatttctatcataacttgatcatctttgacgggtagaacacagaatcagttatcagaagtctcgggcactggcccaggctactacttatttgttccttgaccctaatcagaatagttacttctctaaacttcaatattttccttccactgtgaaattaggcttttatcttctgctttccctacctcatggggttgttttcacaatcagttagagtatttcatatatacacatttgtgaataaatatacatatttaggattgtatgtatacaattgaaaattaaaaatgcatacactaggccaggagtggtggctccagcctgtagtctcagcactttgggaggctgaggtgggcggatcacctgaggtcaggagttcgaagtcagcctggccaatctggtgaaaccctgtctctattaaaaatacaaaaatgaaccgggcatggtggcagatgcctgtaatccccgctacttgggaggctggggcaggagactctcttgaacctgagaggcacaggttgcagtgagcagagattgcgccactgcactccattctgggtgatagagtgagactctgtctcaaaaaaaaaaaaaatgcatagactaaaccatttaataagctttctttgtgtaaatggtttaactccatttaaaatagtacttacactgaaataatgcctttccgtgtcacaaatccattgtattgataacataaattttgtatttatgcaaattaagataacaaaggaacaaagaccctgcttagcaaagtcactctgccaatgtaattagctttgtcttgtttcaactagtcgagcaggagcagttgcttcctttggaaggaagcctgaagaactatcatagaaatttagaatagaagacaaagcatcagaggccagtccagataacactgtatcttgtgatttatcttcccagtctctattaattcccttttggtgtcatagcacagatgactgttactctcttctttcaagtttctttgcctaattttgaatagctatctcgttgaaaacagacaagaaatttggaataccctctgtattattctcattttattcccttcttataatattttcaaacaggaggaaaaagcatggggattttccttgactgttgatattctctagctctgtgcttttttggaatttcatgccatatatgagtattttgtgttgggtatatatagagggcaacattcataaataggaaaacttcaagatttagaggtgttacttcatgtatttctgttctgagaatggaggttcttggacaaatgtatttgaagtacagagcacagagggttaatacatataatattcaaataactattamcaaatatcaaggagacaatgagcccaatgcaaattatatcaaaaaacaaatcaaacgcattcaagtggaaaatgaatatgaaaaaatatcagatttactagttgtcagaatgtaagttatatttacaattaatyattttatagccattaaawttaacagaatawttttaaaatcagtaacatcaattgctattggggatgcttgaaaaattcatatrttgctgttasaaatgtgagttttcacaaaattttaaaaaccattgtaaatatctactaaaattaagataaataacactctttgactttcaaactgttcctaaaaatccaaaacaaccaatgcttaaagatttatgtacagttatttattttcagcattgtttaaaggggcaaaacactaaaaatggattgatggtccattaatattgtcatagctgggtaaattgtgctaggataaaatgcaccctagaaaggaaggaagcaggcacacaggcagtttgttttctgaggaatggacatttttcaaagagattcctgtgcattcacaaagtaatattgcttgattcattctatatcattactatagagtgaatattttaatttgtgcataatatcataaatgttgctcattgtgtacaaatattcaaaggctagtttttacaaatgtaagacaggcaaaacaacttactagcagtaatatcttatcattcatcttctgcattaatattatagttggatagtcatacttaaaaatctaccacagtaagggcagtaagctcaaaggaaaagacatgcaattgtattttcttcatgctttatctaaaatattttttaaaatttatatgagaaaatacaagataattatttgaaataattttttgatataattgttatggaaccctagttttttgtgggaaaaaatgccttttttacatacattgaatagaacaggaatgtactccttaattttaataatttatttgctatcgttatataatcagtgtctagaaagattaaaatggcagaattgattaaaacactttttccattctctactcaagttattggtttatgyctacaggctgagtgcctcggatatcaggatagaaattttatactgaaggaaaattactatatgataaaattgaaaaacttattaggttcatgatcattgtttgataacctatacttactctttaatagtaacttacataaagckttttaaaaatatataatctattgtatttattacacttatgtttggacataaagctttatgtcatcccgtctatgatctggaagttgaaacaaggtggtttcaactgaacactttgcatcctgttgtggatcacttgaagacctaaaatctgtttcttagatactttgatagcaaaagatgcaggagacttctagagataatatttaaaggaaaggaacttttgtactgtttcacataaacctgtatctctatctgtctgtctgtctatggatagagatagagatcaataactaatatcatactgtgaaaatagctattaacatttcttcctttccatatgaacatataccatattttgatgtaatggatttactctaaacagtatttaaaaacattattttgataggtaagtctttaagctccttaaaagacctgagattacatctttatgtagggcatgatttaagaaacctatgaagcttaataagataagaatagcctgtttacatagcttaaagtatttaaagtgtagtaaattggtggttgagctatgtaggtgttctcctctggtaaggttgtttagcatatataaaccactaaaatgatggaaaatacaccaagctgaagtgggatcaggatgactaaacaaaatagttttcaatttctgcaatgagtttggaccaaaattagtttgagaataaatttagggaaaaatgtccttgaaaaaaccataatctttcttaaaagtttttcctaattgtaaatttcactaagacttatgaagtcccatagattataatgaacaaaatttctatatacacctgctgtcactatgagcaacaacaggacaactctttccagcttggatttgtttgaactagacataccaaaatgagytggaaacacttctcgaaccttgccctcccattctgaaatgagaattccatgcaatgactgtacaagttttgtcaagctatggtggaacatggtatcacaaatacagatattccttaaacctaagtattcctggctggtcctaggctgacttaaccttttttattttctctcctaagtcccacagatttggttcatttagctttctattcttggctgccaccaactactttgcaatcctatgttcacagacctccagaggatagagtattttaaacttcccttcatgcttgggaatttatcaatttatttacatcttacaaaattcaaaaagcacccagtttccatccccagatgcaatcactgtccggattcctgggaaacatcccgaactattctatggataagtgagcctaaatgtaaatacatcttccctctttctatgcaattttagcattactgtgcatctttgttcacttaatagtgtatcttataaatttttatgcatttacacatcttgtactgtcttgttctttttctgttcatactgtaatgtcttgctcattttagctggatgtgtagtttcttgcagcatgaatgtgctaccatgtattaagccagtcccctatggagggacatgtggatcagtcctttgccattataacatagtgttgcaataaacatctgtatacattcatcctcttgcatgtgtatgagtgtaccttgaataaattgctacaagtggtatcactgggttataggggggcttgtaggcttgattttgagatatatgagaggttgccctcagacttgtaggatgagggtcctggtctttggccacatcatatacttgccagctatactctgccactgcctctggagctgtccgcaatcacagcttcacataacgtgggtgaggtgagggagcaccctagacccaggccaggcaccaatttaatctcagacattgagcagagaaatcaaatcgctcaaattcaccttgaaggctcaggtactcttttgttaaatcaacatcttttcagcttagcacttcttctattatttacctagttttcatttagatggaatcttttatttattttttgttatatcctcttggtttattgagccttttattaatataagctgtccttctttgtcttttttaatctttttttgatttaaagtctgtttgttcagctattaatatagtcacccttgctctcttttgattactatttgcatggaatatcttttccattctttcactttcaacctatttcaacctatttgtgttttgggatctaaagtgagtctcttttggatggcatgtgtaggttggatattccatatccaaaatgcttgggacaagcagtatctcagatttgagatttttttkkggggcggtggggttggtgggggtggatttggaagtgtttgcattgtatttactaatccctaatctgaaattttgaaatctaaaatttgaatgctccaattagcattccctttgaacagcatgttggtgctcaaagagtttcagattttggagcatgtcagatttagaattttcaaatttgagatacttaacctgtagctggattctgtttttcaacccattttgccaatctctgtcattctatcttggaatttaatctatttacatttaaagactttactgataaaaaagaacttacttctgtcatattgtgatttgttttctatatttcttatagcttttgtgtccttcctttcctagcttactgtcttctttgtgtttagctgattttttataatgtttttattcctttctcatcccttttgtgtttatttctaaagcaaaattatatagctatttgctttatgggtaccatggggattacacttagtattttaaacttataaaactctaatttaaaattatgccattttaattgcaatcataaacaactctgctcccttatatctatatcttgatcctttttagttgttgatatcacaaaataacatttcaatacatgtgtatccgaaacatgaactaattgttgtttatttttaatgcattagtctcttaaattatgtaggataatttttccagatataggattcttggcttacaggtcttgtttttctttcagtattttagctatatcatcccactgctgcatggcctccaaagtttctgatgagagatctccaaataagcttattgagtatctctcagatgtgccaaattgtgtctctgtttatgcttgccaaattccctgtttgtcttttgatagtttgattataatgtgtctcaatgtgtgcttgagttcatcttacttggagtccattgagcttcttgaatgtttatattcatgtctttcatcttatttgggaaatttctggcctttatttctttgaatattctcttttcccttcccctctgcccctctccccctctccccttctccctctatacctctctccctccctccctccctccctttctttttggaactcctcagtgcatatgttggtctgcatgatagtatccacaggtcccttgtgcwctgatcacttttcttcaatctttttccttctgttcctcatactcaataatttcaatggtcctgtcttcacattcatgcatcctttcttttagctgctcatgtctttggatacctcttatgcgtttttcatttttgtcattgtacttttcagctccagattttctctttggttactttttaagtttttatctccttattgatatttccattttgttcacatgtagttttcctgaaattcttcatgtctttagttctttgagcatctttaaggtaatagttttaaagcagttttttagtagctctgtcatcagcttcctctcagggaccatttttgttggtttgttttttcctttgagaggccatatttttaccatttgttatatgctatcttagtccattttgtgattctatgacagaatacctgagactgggtaatttataaaaaaaaagaagataatttatcatagttctggaggctaagaaatccaagaacaaatagctggcatctggtgagggctgctstctgcttccaagatggcaccttgaacgctgtgtcttccagaatggaggaacccaatttctttctttgccctgtccaaagagggaagggcaaaagaaaccaaattccctctggcaagaccttttataacagcatcaatctattcatgctctgtctgtatgacctaaacacctcctagaaggccctaattcccaacactgttgtcttgggtattaagttttccacacatgaatttgggtggagacattcagatcatagcataagcctgttgaattttttgtgaaaactgtgcgtctaaatccaataatgtggtaactctggaaatcagattaggctccttccctggggtttgatattttgttttgttttattgttttaggctgtctttgtgctaaggatcaggctgaggtgtaaagtaaaacctttttagatttcttccaagcctgtgtctttctttgggcatgtgtagtgactttctaatttctttcacatatgtagttgcttttgaatttctttgtctttagtgtgtggttctcaaaaggagaaagacaaaaatgaagggtggaaaaaatgggccagccctttaaatcaccaagaattcctttcagccagaggaggaaaggattgcaactatgagggagaggtacaacaacaatggctgttcacctctgtgtctgcacctccatgataagaagcagcaatcagcaagtagaacaaagatccctgatatttggaggacaaggtccttattgcccaccctggctcctgtaagctgtgtgcaagctgctccaggaacacatgcatagctgcctgtctcaggaatggagggtgggtaatgggtagctattgactagttaagagctgaaattgatgaaaattcatggttcaagctttcctcttgaagtaaaaggcttcagtacactccagagttccaaaatagctacatcagacagattctctcagtgtaattgttgtctgggtgggctgaaagattcctggtgttccccacccctttgtcgttccagaatcctcccttccctgctatttttaaattgacagtttttattgctagaagcatgagagaaacagtaaggaggctaacataattggacgataatttggaagttataatgttataaccaaagaaatcataagtagctgtttctagtcttcattgaaaagtaaatggagtttgaaaagctcctctttgctcaaggctgctctttcgttaatgtttgtgtagacaattgttgagttttgctctaagaacaagcttacccactctctggattgtcatttcatagagctattccaaatttaaacttaggtagattcaggttgagagccaatatcagtatgagagtggttataaaatgattatcattttatgcaattagaatgactactttttcaccatacatgtgtgtgaatttgtatgtttctccttttttccaactcctcaaacagttctgtgtgcataatttagcaagtaaattgagtgtcataaaacctatataaggttaccatcattactcattaaataaatggccaaggtarcacttatgacaaatctgtcttatggtaacatctgcaccctcttttctgctttatgtcaaaacccagattccttttatttaacttttatttttagttcagaggtacaagtgcaggcttgttacataggtaaacttgtgtcatgggggttttacagattatttcatcacccaggtgttaarcctagtgcctgttagttatttttcctgatcctctcccttctcccacccttcaccctctgagaagctccagtgtgtgttttttgcctctatgtgtccatgtgttctcatcatttggctccctaaagagaatgtggtacatattctctttacatggtgtattacatacaccatggaatactatgcagcyttaaaaaacaacaagataatgttctttacaaggacatgggtagagctaaaggccattatccttagcaaactaaaacccatgttcttaaaatttaccttctcaatagaccaacatgttccctcttgtaatgttttctgctaaatagctaccatggtctggcactgaggcaagtatctcttatttctaaacaagttcttaatttaaaaaatagtaatcataatggcatttgtttttggccagattcccaatcttgtattctcattattatttactcaaaaataactttgtcatcttcatcctcaggagtcttatcctcctactattactcattctctggtcttctaaccacagaaagcacatttttatgttatcctttctggaaccctccttgactcaaggccttagaatccctaaacttatattattttatgaaaaactttaaagtttgatttttttatgtaatagataagaaaactgaaatttataaagtttaagtaacttgctcaggtttatatagctcttatggaagatctgagaaatgagctcaattctatatttaaccagtatgaattattgtctttcccaaacccacaagcatcatttgcactgaagactttagaaggctgatcaatcataatttgcatcctactctataattcttacagtctttttctccccaaagcacaagataccaaatctatttcccacgcaaaaataagaaatgttgtactactggtaaaaagtaatatgcagtttttaggaaaaaaatcatgacatttgaaagaatattatgtcactttagtattattttcagactgctaaacaaccacccttgataacatacttttattttgtgtcacattctaatttggtttatattctgtctatattattcatagcagattccaaaatctccttagttcttgacttgcttgtatataataaagttttttttttctgaaccacatcattaagctgaaatgtgtgtatatatatacgtgtatatatatatacatatagtgtatatatatgtgtatatatacacgtgtgtatgtgtgtgtgtgcgcatgcrcacctgtgttggttattttgtggtttgtttttgttgtattaataaaagattttatttgtatgctttattaaggttwtatatatatatatatataagtctccaaaataccagtcccgattttgaatactaaatttctttctatcatggtattctttgtttttaaatcaaaccagtataacaaaaatctaagcaagatagacaagagtaaacttagaagtcaataactaaaaggcacactcacacacaaacacacacacacaaacaccctagcgatctgtaattacagcaatctgtaagcccatcagtcatatttccattttttgtgaccatgtgaccacttcctagtttttagaaaaactaattccacctagcatgagtctgtatttggcacatttttttccaaaaacatttatgcaagatatgagcagtactatactgcaacatgtttgtatgctttggggcaatgattttcaaaaagtcctctatttccagcctctaaaaatctcctcattagtctgagtagtgacaggttcacacaaacctctctatcactgctgaaatgccaacaaaaatagtaactgcttttttctctaggatcaattctcttgtcataggtcaggctgctgagcaatcattcaatcagtcttttagtcatggtcctataacaaactccttttctccctgttgggatcagtatctgattcaggagaatttactaacatttgtttagctctgaaaaatttctccttttattcagtatctttaaaattcctcatgaactattgaaatgttaataaaaatattcaactagctattattatgatgttaaaactgatagcttttcatgtaatttggttgaaaagcactagacattatcaagtgtagctaagtaaataagaaataaaacatttattaggaaatactgataatttttagctttaataaacagaagaattggctagtcatttctgaaatcagtcatttttgaaaacataattatattctttacccagagcaaaactggggtaatttaatgagcaatataaataagatgccccttaaaagtagaagaatgcatttgcaaaactatgagaataaaaatgcaatcctgacattagaattatgtgtccactgggaaattctctgaagcaagttctttcaaaatgtcattgaataagtttttaacctctccagctttttccactacctagctgttctacttcatttattcttgtcttttatattgcacttcttcttcagggttagttagttgctctattctctaaagttaggttttctgtacccaaatctgaatgctaggccctgtgtcctcatccagatacttaatgtatttcctagttcaacattttaagtggggttgataatggtgtaaatatttataaatgctaacacctggttcattttaacaggaaaatgttcaactttattgaccatagtttttcacatattctctcagggactttgtttttcactggccaagccattgtgaaaatgttttgaaatgtccagttttcataaaaggtttagtgatattgttggtttttgatacacgtatgtaaaattggtaatttttaatttctgaattcttctacacaaaaaataatacctacatatatttttaccattttagtttgcacagccatgattgttagtgaaaatgaacttaaatcttaatactatttttatgctcatactcctaaataatgactttaaaatgtattgcactttataggttgctatacaatgacaaacatctcattagtatcgataataagcttctaatatccttagggatcatatagtaaatgaaaaaaatatattgtgatgttaaatgacttatgtaatactgtatccrttcagatactttcaaatgcaaattaaaaaaaaaaagaactgaaacttacataaataataaagcaatgtattagttaacatgaaagaggaggaaagcttcaaactgacttaatccggtggctccagctttgggtccacttccctaagatttttctcagccctctccaccaggtttttttgtctagtcattaggctgggaaggaaataactacaggagatactggctttagagttctttgaagaaatatccagctaggagaaaggtgttgtttttattttattttattttatttttttctgtctaacttaagattaaattcaaatttccctgaagctataacaagcttcatttcactcgattgcccaaatttagtctcatcctcagttctgatctaattcatgttgatggaggtgtgtcactgattgataggttctcctactacttctgtttcatagcaattattataatttgaataataagcaaataaagttgtgtgcagttaatttatttttttttcacctgtggtagggtagaggctttgcctattttgttcctcaatgtagcacagcatagacaagtccctagaacatggtatttgataattatttagttattaagtagagacaaagaaaattcatgtaattagtttcatatggaagttggtatttaggtggggtggtaactccaattctttctgaggacagaatttactatgggaaatatttaagctattatccttgccatccacaatcttagtacatttctgcatgctctctctctctctctagttttctactgtcagtgtagcatacataaatactacataaatacaccatatttactcattaaaaaaacaaggctgcaaacattgtctcatctttttcccaaattaactgcagttagcagaaagtttagtaactctgggttagtttgccttcctattaattattccagctacttcagagtttatagccctaaaagggatcagtttgattccctcacccatgcagagggaacactcaaaytccccctygcatccctgctaatgattccttctatcctgcagcgtgtatcattcatgcttagttatgcgagtccaacagatccttgatgttaccttgctgatctggctcattgtacagattcactctgtccctgaaggatggtgatacccaacttcagggctcatttcagacaatggcttctcagactatgtctgttaatattgcaacttttggtcctaaccttctttagtccctatacattttcctgaaatgaggtggtccctggagtgctgatttggactagctcgtaggtacaccacattaaaacactttccccttctcttgagcttacccacacctgcaagtcaagcagattaatattgtcattttagtcctcaaaacacaaataatttatgtaaagctcttttctgccatttgtttatggaagagcaaacttaaattattctactggtcctggactcttcatttggagatctctatcttcaataaaatgatttttttgtcatctcactaaagaagagaaaaagaaaacaatctacaaatatcatttctggtatagactctgaaatattacataccccttaatattgttgtaccttgttttattgttgttgtttacatatactaatgtatgtagacatggcaagggaattctgaaaagcaaaattcctggaataaccaatgatttatttgagcacagtttagtactctattagactatgttgagagatcaaataatattcacattcatattatgaaaaatacactattttaaaatgaaaaacagatacctaactatgtcatgaaaagttacattcaagtaaaatagaaaatcttgaagtttcgtgttcccaaccaaagacgagaagaagaaaatgctgtagtattagtcaagaattttgcttaaacagtgcccctctacttactttgcttaatccttscttagatagagaccagttgcaactttgcaaggtttcattgcctcatctataaatatgggataataataatatctaatctctaacttgacacataggattaaatgagataaggcatgtgatgtaattagcagcttagtgcctggctcacgacacacacttaatagagattattgcaattactattgtcatcatcattctttaacacataaatttgggatgaaaaataaagagattcttgcatggtaataatcaaatgttttaagttgaagtagatgctccctaaagaggcttactggtgtattaaaaatatgtttatgatttattttcttattcttaggcagttgctatttatcttgactcattttcttatttgattttccttatattccccaaagtgagggtgaaggttggtatacttctaattttgcatggagatataggaatttaatagaactacactccctgattcttcctttgggtttctttaggcttaagcctaaaatctacaattagaatggaaataaatcctaagtaaatataataacgttcagctatatttcgcacaattgaatttacttgatctcagcatccttacaagagtggtggaaaagttttattattccattttacatactccgaattggttctcaatgacattaaatgatttccctaaggtctcatgtctgggaaatgtcaggatagtaagttgatcataaaatcctgtaatattttctttctactacattacctcacattatcttttgaaacataacttaatctttttaaaaatagttttcttatcttttctttcactctcccttcttttaactaggcaaaaccttgtttaaactatgccattgctgtgaacaagtaggaattgctgatagaggaattaaatgttagaagatacagggaaacattaattttttctgtgtaacattgggttattcagcttttgtgataatggtttcccaatgactggaagaagattgccaaaagaagtagtaagacagaatctaagtagttttctcccatatcatgagtcccaagaatacccacatgtttgcaaaaatcctggtggagagggcctctgataactcagaggcattgtactgtcagccatggcttattacagtgaaaggctacacaacaagctcagcaagagaaaagacacatccagcaaagtctggaggaattcatgcacagcattcagaaaaccctttctctcaggaggggccacacagaatgtgttctttcttccggcaattaaatacagcaacacttatgcagtgtttctgcccaggagagtctgctgttgactgagttcaagattttccctggggactggtcatgcaggcactctctgcctatgtgatcagccacaatcatagaaattccagactcscagaaggaaagcagctgtttactataaatcaggctgatacagctaattcagtgcctcaggcaaacaaaacagctttatcagtgtagggaacttcaaaagccacattgctggaaaccagccaagtaacagccctgcaagcaggcccttctaaagagtagtttaagacctcctgtggtaactgctctattttccagggacaatacgtaggggacagaggaacacagcagaattttgaaacaggatatacaatcacaataagagaaggagcaccaagtatcttctgttatcagtagaataatcctgatattctaaacctaggttttcaattttttttttcargattttgcttatattgtaagtacagtaaaaaatcaagatggtgaaatacaactcaggaacacacatgtattaaggcaggtttgacagttccatcagtatactacaaaaaaaaaagtgctttgtaaacctaaagccacagtggccttagaccatgttaaatgctttaatacatgtccaaaggattaaggaagtataaggaaagagaatgtgagttctttttaggaagatttaagaaagctccaggaagaagtggcatttgagatccttcatccttaaagatttcaatgacaaaggtggtacagtgatattcttgttattgggaacaaatacaggaagctatgaatatagaaaatattgggaaatattgcgtaatttggtgtaatattgtacaaaacagtgatgtacattattgtataattaatataatggtaaaagttatattcatatcatactattacaattaattatttttgatattcgatatatacaaggttagaattgggaaattcataccaaagggatttgttcacctattttctatcaaaaaaaatcccattggatattaagcagcaaattatttatacaatgttgggaaataatgtggtaacacttgtttaytttttaatgttccatatggatttaatttttgtgttattgtctgtagaataaaggacaataaaaaaattaccaagactttatctggttgttctggtatgtttaaacaaattccttggggattagtatttcatttactaataaaaacttttcaacttcagtggacagctattagttgatacacatacaggtatagaaattataaataatttttcaccgaatcatactgaaaaatttatagtcattgttttagaaatcatatttgaatatgacttctttcaataatatgacaattaaaatgttaggaaaacactgattcaatatgtactaatttattctaaatgccaagtgctaagtgtacttatatctataaaaatgaaattatatgaagtgtacaattactttatcaaacattcatccatttaattaaaattttctttgcgttttatacctaacttgtaatattttgtatattcccatcaagtttttctaattsctttcaattggaatgagatgtgcttgagatggtattagaaataattaagaagtcagacacagggagattgctttttccaggacattatttaggtaaactattttcaaaaatatcaaacagtcaccaaaatgggtcacattctataaataatagaattaagttttgaaacaaaggttgcatactttccttgttaaaatccaagccattctcagaaaaagctaattatcttaaggctgtgagtcaactgttgccaaatggtcgcacagttagcgacagaggagaaatgaagcacagagcagtaaaccttggggattcacctggcctccttygcagccaagatttttcctatggtgttagacaacaattaaaaaatttgaaatggaaggtgactcagtaaagggcaaactgaaaagtgtaactctcaatcagatcatccatatcacagtaaaagaataaccagagaatagtgaaaaaataaggagaaagtaacattttccaaagccggtgtgaatagataattattcttctgcgtaactggagaagtagaacaaatactgacatcatatataatagggacctttaccaactagctgggaagtcttcagaaatcatattctctatctctaggtttcagtttttcaccaataaaataaagtggagtggactaaatgatttctgaggctgtttttccatgctaacattctatgtctttatataaaaggatctatttgtagaatagttgagtgtaagcagcaggagaaagaccttatctgttttgacccagcacatagaataggccctgtcccgctgggcgtggtggctcacacctgtaatcccagtactttggaaggctgaggcgggcagatcacgaggtcaggagatcaaaaccatcctggctaacacggtgaaaccctgtgtttactaaaaatacaaaaaattagccgggcatggtggcaggtgcctgtagtcccagctatttgggaggctaaagcaggaaatggcgtgaacccgggaggcggagcttgcagtgagcagagatcgcgccactgcactacagcctgggcgacagagccagacaacgtctcaaaaagaaaaaaaaaagaataggccctgtcccacagtcagcactcaaaacaacacttgttaaatgagtgaataagccagaaaataaaggctggtggattggtaaaatgacttttactggaaagactgtgtatgctgacacatacactggtacaataagatgtttgtctcatccttttttttttttcttttttttttgctgagacaggctctcactttgttgcccaagctgaagtgcagtggtgccatcatagcttactgcaagcttgaaactcctgggttcaaacagtcctccctcctcagcctcttgagtagctaggactacaggcctgccctaccacccctgggtaattttttattttttgcagaggctgagtctcactatgttgtctaggttggtctcaaactcctgggctcaagtgatgcttccacctcagtctcccacagtgctgggattacaggtatgagcactgcacccaccccatccttcttctttaaggtaaattacaccctttgtgatggtggagcaggtagataaaaacgaagtccctaaggagcctcagtgtttctcacaggtttctgtgctcctggttggaaaagctaaaaagtggtttgaagttagttatgaatattagagaataccttttgtaatgagttatctgctatagagagtaactagtcctctaagcagtggtcagattgctgtttcatgagaaacagtgactagcttttccatgttgaatgaatccaagtaatatcatttaagttaatatacagatttaatttcaaaatctatcttcttgactggtacatcctggctaacttgttagacatagccatggaatttatttaattagcttctccttactataacaaataaatgctagtttgaatgaaaatctaatgagagccaattatatatttaaagcatcacctgacttttgaaagatgttattaccagatagggagaactaaaatatactcaattagttataacattctcttctcaatgttcatggatttcctagtaggatccaattctcagaaattcatgatgcaaatgcagttaaattgaagtagatatcatagagaaataaaaatggtcattttattttcagttagttmtttgggtttgagaggatattaagttacagtatgagacactgatctgtcaaaattatgaaacattgatctgtgagataaaaatgtaagccacggtacattttctgacttrcagtctgagactgcacrtttatttttctgttatgttttgctgttcctagaaattaataatgacagaaataaacacatttaataaagtaagatttccagcagtggattttaacacaatctgatttatttgtttaatattgagtcttcaatagagtttctcagatagtatgtagttttacattatgagtactacatttaaaagtgggaacttaatatggatatactgaaagcaatgccagtttacaagataataattattaaaaatgtaaagtacctacagcgcaggtgaaataatgcacgcgtagactaccactggttacttgtttaatattttggggtactcttaaaagaattgagggaaattttaaaagaaaagcattgagactccagtttgatataggtaaaggccacaacttttgtatactgatacacttatttagttgaaatcgtttaggtaacaatgctcaaatattaaaatggagacatttttaaaattttgatttttggccaggcatggtggctcatgcctgtaatcccagcactttgggaggctgaagcaggtggatcacctgaggtcaggagtttgagaccagcctggcaaaatcctgtctttacaaaaaatacaaaaattagctgggtgcggtggcatgcacctgtaaccccagctactagggaggctgaggcagaagaatcgcttgaaactaggaggcagaggttgcagtgagctgagatcgcgccactgcacagacagagtgagacatcatctcaaaaaaaataaataaaaaataaaaattttgattttctaaaagacaagaaaatcctagaattttatagccaatagagatattcaagattacctagttcagtttattaattttcctgaaaaagaaatgtagtctcagagtttttggtgatttgcccaaggttagcgagagaaaagaaacaatttattcatttcacttttttttttctgaatgaatttgaatggttaatattatactcaatatattaatggcatgtttatgttaaaaagggtaaataaatatcattttatagtaattatagagatttattcattcagttcatttaattaatattagtttagtatctactaagtgccagacactgttctaagtactggggatataaagttttaccagatggacatactgtcatggactttacgttctggtgagaagaatagtcagtacacaaaataataaatacattaatatgaaaaatattttccagtgttaaatcctgagcagaaacttaaaattgagtgatatgacaataagcaagttgatgtctattttagaatcaatgctcatgaaagtcctttgacacaggaaatttaaactgagatttgaagggcaaagggataaccctatgaccttgggaaggttgtggggagagatcattaaaagaagggaacagctggtacagaatctcttgagtagaaaagattcagaaacccattgaatgccatttagaatttattgtatataatcatatataattttaccattttaaatgtgttgttctcaatgtataatatagagtcagactttcttaagtaaaccttttttaatttttttttttttttccaagaaatagtcttgctctgtcacccaggctggagtgcagtggtgccatctcagctcactagaagctccgcctcccgagttcatgccattctcctgcctcagcctcccaagtagctgggattacaggtgcccaccaccacacctggctaaattttttgtatttttagtagagatggggtttcaccatgttgaccagactgtttagaactcttaaccttgtgatctgcctgccttggcctcccaaagtgctgggattacaggcatgagttcccaggaccttctttaattttaaaacattatgttaaaactaaatcattactcttggtattgtgctacttctaatccatcctctttattttagttgaactcagtttatatttctaaacattgcaagttagtttagttttcaccctgaaataaccattatcttgatagaatggggacactgtcctgtcaagaattgtgctctttggcaggggtccctaacccccaggccacggaccatgcttgtccatgacctgttaagaaccaggctgcccagctggagatgaccagtaggcaaatgagcattactgcctgacatctgcctcctgtgagatcagtggctgcattagattcttatgggagcacaaaccctattgtgaactgtgcatgcaagggatcttggttgggcactccttatgagaatctaatgcctgatgatctgaggttgaaaaatttcatcccaaaaccatcctcacccccagcggtggaaaaaatgccttccacaaaaccagttccaggtgccaaaaaggttgggaaccgccgctctacaagagagtctggtattaacaattttaaaaaataaagtctttgtcactgattattgtttagcatttaatagaaaaacatgatggcacactctctgtggtgttgtagatagtgtgataagaaaatgctgactctcttaaaattatagaagaaatactagatttttgttggcttaactttaataagaataaataaattaatatgatctccaaagtgaacactactgatattacttatggatctaaattaatatagtacaaatttggtaaaactatttagatacatggatgcttagaaaagtaaatattccattcattttgcaaatatttaagtacttatttagaacctagcatcatgcaccaagcactgtttgagcaactggtataatttagaaacataaaaacaaagatccctgtctttgaggtacttttattctaacatggaaagatgataacacacaataataataaatttatacagtgtgttaaaatgttttaagggtgccagaagtgaagtaggcagaagattgtaatattaaatagagtggtaaaagtagtgctcattgagaaggtgagatacaaacaaagacttgataagccatgggagttggctatgcagatatctaggtgaagagagttccaggcaggatgaacatctagtccaaaggcctatggtggaagaatgcttggcatgttaagaactatcaagagagtcataatgttgcaatggattgatgggtttggtgtatagagagatggggacagacataatagacagattcatatgcaaataatcataatctagctattaatactctctttttacctatttgagtgcattctctctttttatgatctacggtacaaatatgaaacgtagcttactagatagattgattcaataagcttagtatctcatcaaatagtttttcaaatagcaaaataattgccttatgatgtgacatatcacacattaagtgctagtccagttcttacatatttaaattcacggttagactgtttaccaccatgattgcatgctaaatcaacatgcctttcactgacaatatttagagttacttgttttctgaaagggtgtctttgacttcctatttaaggattagattaccaatcagaattgttagaaataataccccataaagtttatattggtgattagtctcatatctgaactggaaaacaccatcacaaacaaccactcaggtatgagcatcagacatgctataagtaatctagtttcaggataaactctactgtatgaaacctcataaaatatgatgacccaagtccctggagcagaaggaatttaacttatgcaatgtaccaagatgagaactgctagaaaactggggggcatggaagtgctaatctagtttaatattttagttagccttaagcaacaataatcacagacacactctatgaaatgttatttgtgcccatacagtaacattaattttcttttaatttttgtctgcctcaggaaatatttcaattgaatttcacattttttcccaaggaatcagggcttctggaattcaacgtcatttacttaactttttttccccacagttattttcaaatctaaatgaattcaaaaccaatcatttattattttgcatttacttcttcagttggtaaaaatgacatggtttagattgatctcttgaacattaatatagttctggaattaggcttactcatttaataggttactcaatcactgatttgctaaacatgtatccaaatcatgtcagttagttatctcaacacacataaaaataaagtattagttacttttggaggtagtatgtgtaatagttccaaaagtagctctgtaatgagatactctgggctcagtattcaactctgctttctttgatctgtatatccttaggaaagttaattaacctctccttccctcaatttttctatggcaaaatggggattagtaatggtaacatattgtaattgtgaggtataaaaaaagtatataaaatgatataaaaataatccatgtaacatgtactgcataatgcctggcacctagtcagactcaaaatgtaaatatttctgttacatacatatgtgtatatttagaagtatcctgtggtatggttacaatattgcttaaggtaataagtgaggattttccatttttacaaagacagaaccttaaaagtgaagcatggttaagtgcctgaaaataatgacatatattctttttttaaatgggacgtgaacaacaattcaaagcttccagtgaatggcttattacagtatagacattcaaagatgaataggattaatttagaaaggagggaagaaaaaatatagtttgataaattttgacatttggctgttctttgtatttcaatagattttagcccaaatcatgataaactccataaaattttcaaacatgtgctttagaaatcyctctgtgacttaaatttcaacatagcctagggggtgaatattttttcaataaatggctaaaaaagagataaaagaattacaaatctttaaactatgtttattaacttaaaaggaagactggatttatgtgtaagaatgaattagtgcagtttttaagtaggttaagttgccttaggaaatgttctgtgtttctaagtcaattctgtaaacctatgacactcctcgatattatcacttacaaaacgaatcctaagtaagactaacattagaagtccatatatgcaacaaaatatttttatcaacaatataattggaaattgaaactgaatcaaaaatttacacaacaaactgatagagtaaaatacagatatgtaagttaaaaaaatcagaaactacggaagcttaaataaggctgacaataggtgtgtaagctgtgttcaaagttttttggaattttttaacttcttgagtagtttaattagtttcactgagaggccatacaaaacagaaagacacagagtaagaacctgtaaaaggaccaatatacctgtcttaaaattaaaacataatacagatactagattttaccactctgcagagatcatccattacaactctctatatcctcctcccgataatcatcaattttttaccaggcaagcaaagacccagagacttaaacaatatccttatcatccaacaatgtgtttctgtcactaatatgatgctgccatataataaatgtggcagtgaaaagcaagcaggccagaagtgttttacgactcttgtcgttctttgggccacatgctgtagctgcaacgtgaaactaacaatagcaagaactaataaggggttgcattttattttgtctaaagagatcagttcaaaaacaaaacagaataactggtagatcattttcatttcagcccaatgggggaagaactattttgcaatataacatgtgataaggctatggtcagaattaaattaatccaggtaaaacacttggaatggtgcttggtacatagagaacatgcaacaaatattagttatttttataactgaaatagtaatgagtcttttatttagataatgccaataagggcagcaacatcttatgccactaacatcagtgcatgttgcagttaacgatggagtaggcactgtgctgcgttttataaagattctttcatttatactataaattatttcaattttatagctgtggaacctggcccatgaaatggttaaggaatgctctagaagttatacagtttttaagactatgatttatgatagaactgctgaaacaatttgtttaaacaaagataattctggattagggaccccgtggccagagttcaagtccccaaactgacacttataaattaagttccctggctgcaarcctcctcatctataaaatgaagaggttgagctacagttatctaaagttccttctagctctttcctgtgccttcacggctaaagctaaatgttaaaaagtcacacagttacttgaagccttttaaaaattattattttattcagttaaatcatggctactttctacatgttaagaaaaactatcacaacgaaatctctgaagttctagaaataaaatatttattccatctgtccaatctatattttttcaatcagaaaaaataaatcaaccaaatctagggatattagatagtgatttctgcctttttgtttacagggaagcaggagaaatccttatgacatgatagaagttttagaagggtttctaatcattatgaaggggtagatctcttccctcacctccctgtgtaccttagacaaagtgggtctgtatgccagcgcagttaccaggggtgttcatgcagttactagaatgcaagacaaatttggtaggaagttctatttttttttttttccagttaatagcctttctcccttcctgccgtactaaaccatcttaatttagcacactgcagaacatttgctttagggtaatttttttcctacctaaaatttataacattttggttttgtctcatgtgattaattttgatcaatgcagagatttcatattctatagtgagaaatatgtatactgagggaaatgaattttttccaaccacatcccccagagtatttttaaatatgctttgctcaagacatgctaggcaaatattacatttatatatggttgaagaataacaaagtggattttaaatcaattaaaattctgtgaatcttatattaatattaagaatcaacccatatgcatacatatatatgaataatttgactgttcgtgtgtacatcaagtcttttgaagagtcagacaaattgtctcagtgaatagaactaaaacatattcttctttctgaagtattttaatatgtgttttagtggaaatgatataaaagtataaaaatgcaaaggatttttttgttgtgtggtatatataagtgaacacaaataaaggtgtttgggttattttagattaatacttattttgaaagtatcccttgtgctaaatgttatttcttagttagttggggtgatattacagtatgattttttttaaagcaaatcaaccaaattactgtcaataagagtcagtaaaaatcaagattgtgcatgtttcctagcataggttgtaagtcacagttgatacttccctaacagttttccacattcaagccacctgaccttccaacttgaagacagtcttgctctagtactcaagagtaatttctgctatcagttaaggcttggcatctcccagatcatagaattaatgaatcttactataccttacttctcctttgaaacacaatcttgtctaaagccctagtatcatatggaaaatcctcttaagccattattttttgcccacacagctctcaaattcttgtcatcagatatactgcttcaggttttcaacctgaatcttggtctgtcaataatctagtgcctaaattataccaagctttttacattgtttatacagtacctcttatctactctggcaagcttgcctttcattccatattccaaccatgcagttttttttttttccactaaatgcttattcccagctccttttaatcactgtgttgctttgaagaatcatgrtgattcatacatgagtttcatgttacaataaatttgtattgaaaagtatgtaatacattaaacattttgactgatggaagtttaaagcaatttgactaaggatgaaaggatgaacttggtattgaggctcttaaaatattggtttaagttttattttatgcttactagatctggaacttagtcacataatttaaattttgtaaactttaatttcctcctttgaaaaaataagctaaaataatatttaccttgacttgtgtttctattcatgaaggagttacatctgtaagtcttgtcttccagctttcattgctagaaaactggactaaatacatagaaaggctatgatcttcaagagaagagaaacaaatgagatcaatccaacactggaatttctgactggaggcaatttttagaccatggtacatggtacatggaggaacagcctaaacataacttcatggtattcaaattttgtagttgagaagataagatctgagtttagagagaacaaaggagctagaatttgtggggcagattaccagagaggagggaaatacacaaagagctctagaaatccgcatagggcctccccagaatatttgtttgaatagcaatctacacatacataatgtgaaattccacatgaccaggcaaagaacaactgtgagaaaagaataattagagtgaactgtcagtagaattcccaggggtctcacaggtctggtaatcttttgatttcccatcagccagaatagggaacccccattaaatacagagggtattcagtagagagcacagagggaccaagccttaggaacagggataaattaacactaaagactacttcagactcaccctaaaaaatgtttaatgcaagcctcaaaggaatcagtatcactcacaggtaacttaactgcctgccaggaacaattctacatctaaatcaatgcacctaaatgtaacactaaataaaataaaatttataatatctggcaaccaataaaaaattactggacatgagaaaaaatagtaaaatgtgactcagatcaggagaaaattcagtcaatagaaacagacctggaaatgacagataatgaagttaacagaaaaagttgaaaacactattgcacagtgtgaatgacgaagaagacgggtgatttctgcatttccaactgaggtaccaggttcatctcactggggcttgccagacaaatgggtgcagcccacagagcagggtggggcatcacctcacctgggaagcacaagaggtcagggaattacctttcctagtaaagggaagccctgacagagggcacttggaaaattggggcactcccaccccaatactgcacttttccaatggtcttagcaaacagcacaccaggagattatatcccacacctggttcagagggccccatggccatggagcctcactaattgctagcacagcagtctgacatagaactgcaaggtggcagcgaggctggtggaggggcatctgccattgctgaggcttgagtaggtaaagcagccagggaagctcgaactgggtggagcccaccacagctcaaggaggcccgcctgcctctgtagactccacctctaggggcagggcatagccgaacaaaaggcagcagaaacttctgcagacttaaatgtccctgtctggcggctttgaagagaatagtggttcttccagcacagagtttgggatctgagaacagacagactgcctcctcaagcaggttcctgacccctgagtagcctaaataggagacacctcccagtaggggcctactaacacctcataaggctggttgcccctctgagacgaagcttccagaggaaggattaggcagcaacatttgctgttctgcagcctccgcaggtgatacccaggcaaacagggtctggagtggacttccagcaaactccaacagacctgcagctgaaggtcctgactgttagaaggaaaagtaacaaacagaaaggacatccacacaaaaaccccatctgtacgtcaccatcatcaaagaccaaaggtagataaaaccacaaagatgtggagaaaccagagcagaaaagctgaaaattctaaaaatcaaaagcctcttctcctccaaaggaacgcagctcctcgccagcaatggaacaaagctggacagagaatgactttgatgagtcgagagaagaaggcttcagaagactggtaataacaaacttctccgagctaaaggaggatgtacgaacccatcgcaagaagctaaaaaccttgaaaacagagtaaacaaatggcaaactagaaaaaacagtgtagagaagtccttaaatgacctgatggagctgaaaaccatggcacgagaactacgtgatgaatgcacaagcttcaatagcagatttaatcaaatggaagaaagggtatcagtgattgaagatcaaatgaatgaaatgtagcgacaagagaagtttagagaaaaagtaaaaagaaatgaacaaaccctccaagaaatatgggactatgtgaaaagaccaaatctacatctgattgatgtacctgaaagtgatggggagaatggaaccaagttggaaaacactcttcaggatatcatccaggagaacttccccaacatagcraggcaggccaacattcaaattcaggaaatacagagaacgccacaaagatactcctcgagaagagcaaatccaagacacataattttcagattcaccaaagttgaaacaaaggaaaaaaggttaagggcagccagacaggtcaggttacccacaaagggaagcccatcagactaacagcagatctctcagcagaaactctacacaccagaagagagtgggggtcaatattcaacattcttaaagaaaagaattttcaaccaagaatttcatattcagccaaactaagcttcataagggaaggagaaataaaatcttttacagacaagcaaatgctgagagattttgtcaccatcaggcctgccttacaagagctctggaaggaagtactaaacatagaaaggaacatctggtaccagccactgcaaaaacatgccaaataaggccatcaatactaggaagaagttgcatcaactaatgagcaaaataaccagctaacatcataatgacaggatcaaattcacacataacaatatgaatcttaaatgtaaatgggctaaatgctccaaataaaagacacagactggcaaattggatacagtcaggacccatcagtgtgctgaattcaggagacccatctcacatgcagagacaaatataggctcaaaataaagggatgcaggaagatcaaccaagcaaatggagaacaaaacaaagcaggggttgccgtcctagtctctgataaaacagactttaaaccaacaaagatcaaaagagacaaagaagacctatgtaatggtaaagggatcaattcaacaaaaagagctaactattctaaatttataggcacccaatacaggagcacccagattcatgaagcaagccttgagagacctaaaaagggacttagactcccacacaataataatggcagactttaacaaccccctgtcaacattagacagatcaacaagacagaaagttaataaggatatccaggaattgaactcagctctgcaccaagcagacctcatagacatctacagaactctccaccccaaaacaacagaacatacattcttctaagcaccacatcacacttactccaatattgaccacatagtcagaaataaagcattcctcagcaaatgtagaagaacagaaattgtaacaaactgtctctcagacaacagggcaatcaaactagaactcaggattaagaaactcactcaaaaccactcaactacatggaaactgaacaacctgctcctgaatgactactgggtacataaagaaatgaaggtagaaatraacatgctctttgaaaccaatgagaacaaagacacaacayaccagaatctctgggacacattcaaagcagtgtgtagaggtaaattaatagcactaaatgcccataagagaaagcaggagagatttaaaattgacaccctaacatcacaattaaaagaactagaaagcaagagcaaacacattcaaaagctagcagaaggcaagaaataactaagatcagagcagaactgaaggagatagaggcacaaaaaacccttcaaaaaatcaatgaatcctggagctggttttctgaaaagatcaacaaaattgatagaccactagcaagactaatatggaagaaaaaagagaagaatcaaatagatacaataaaaaatgataaaggggatatcaccactgatcccacagaaatacaaactaccatcagagaatactataaacacctctatgcaaataaaccagaaaatctagaagaaatggataaattcctggacacatacaccctcccaagactaaagcaggaagaagttgaatcccaataacaggttctgaaattgaggtaataattaatagcctaccaaccaaaaaaagtccaggaccagacggattcacagccaaattctacccagaggtacaaagaggagctggttccatgccttctgaaattattccaatcaatagaaaaagagggaatcctccctaactcattttatgaggccaacatcatcctgataccaaagcctggcagagacacaacaaaaaaagggagttttagaccaatatccctcatgaacatcgatgcaaaaatcctcaataacatactggaaaaccgaattaggcagcaaatcaaaaagcttatccaccacgatcaagttggcttcatccctgggatgcaaggctggttcaacatatgcaaatcgataaacgtaatccatcatgtaaacagaaccaaagacaaaaaccacatgattatctcaatagatgcagaaaaggccttcgatgaataaaattcaacagcccttcatgcaaaaaactctcaataaattaggtattcatgggacatatctcaaaataataagagctatttatgacaaacccacagccaatatcatactgaatgggcaaaaactggaagcattccctttgaaaattggcacaaaacagggatgccctctctcaccactcctattcaacatagtgttggaagttctggccagggcaatcaggcaagagaaagaaataaagggtattcaattaggaaaagaggaagtcaaattgtccctgtttgcagatgacatgattgtatatttagaaaaccccatcatctgagcccaaaatctccttaagctgataagcaacttcagcaaagtctcaggatacaaaatcaatgtgcaaaaatcacaagcattcttatacaccaataacagacaaacagagtgccaaattatgagtgaactcccattcacaattgcttccaagrgaataaaatacctaggaatccaacttacaagggacgtgaaggacctcttcaaggagaactacaaaccactgctcaatgaaacaaaagagaatacaaacaaatggaagaacattccatgctcatgggtaggaagaatcaatatcgtgaaaatggccatactgcccaaggtaatttatagattcaatgccatccccatcaagctaccaatgactttcttcacagaagtggaaaaaaactactttaaatttcatacggaaccacaaaagagccttcattgccaagacaatcctaagccaaaagaacaaagttggaggcatcatgctacctgacttcaaagtatactacaaggctacagtaaccaaaacggcatggtactggtaccaaaacagagatatagaccaatggaacagaaaagagccctcggaaataataccacacatctacaaccatctttgacaaacctgacaaaaacaagaaatggggaaaggattccctatttaataaatgcttctgggaaaactggctaaccatatgtagaaagctgaaactggatcccttccttacaccttatacaaaaattaattcaagatggattaaagacttaaatgtcagacctaaaaccattaaaaccctagaagaaaacctaggcaataccattcaggccataggcatgagcaaggactttgtgactaaaacaccaaaagcaatggcaacagaagccaaaattgacaaatgggatctaattaaactaaagagcttctgcacagcaaaagaaactaccatcagagtgaataggcaacctacagaatgggagaaaatttttacaatctacccatctgacaaagggctaatatccagaatctacaaagaacttaaacaaatttacaagaaaaaatcaaacaaccccatcaaaaagtgggcgaaggatatgaacagacacttctcaaaagaagacatttatgcagccaaaagacacatgaaaaaatgctcatcatcactggtcatcagagaaatgcaaatcaaaaccacaatgagataccatctcacaccagttagaatgacgatcattaaaaagtcaggaaactacagatgctggagaggatgtggagaaatagggacacttctacactattagtgggactgtaaactagttcaaccattgtggaagacagtgtggcgattcctcaaggatctagaactaggaatagcatttgacccagccatcccattactgggcatatactcaaaatattataaatcatgctgctataaagacacatgaacacgtatgtttattgtggcactattcacaatagcaaagacttggaaccaacccaaatgtccatcaatgatagactggattaagaaaatgtggcacatatataccatggaatactatgcagccataaaaaatgatgagttcatgtcctttrtagggacatggatgaagctggaaaccatccttctgagcaaactatggcaaggacagaaaaccaaacacctcatgttctcactcataggtgggaattgaacaataagaacacacagacacaaggtggggaacatcacacacaggagcctgccggggggttggcggggggaaggatagcattaggagatatacctaatgtaaatgatgagttaatgggtgcagcacaccaacatggcacatgtatacctatgtaacaaatctgcatgttgtgcatatgtaccctagaacttaacgtaaaataaagtaaaatgaaataaaataaaaacaaaaaaactattacaaataaaaatgtcaaggatttaatgagaagtataaagagaagtataatatgagagaaatagatagtaaaataatatcaaaattaaacttctagaaatgaaaactaagatagctgaaataaaaatttcactgaatgggrttaaaagcagataagacactgcagaagaaaagatcaatgaacttgaaggtgtaacagtagaaaacatacaaaataccaagagaaaaggaggttttacaaaagtaaacagtgtcagtgattttggtgacattaacaagtcatttaatatataatttgagttccagaattagatggtaggaaaattgagggtcagaaaaactgtttaaagatgtaaggccaatgttttccccacaagctttatgaaaacaatactcccatgatctcgactcactgtaacctctgctttctgggttcaagctattctcctgcctcagcctcccgagtagctgggattatgggcacccaccaccacacccagctaatttttttgtatttttagtggagacagggtttccctatttggccaggctggtcttgagctcctgacctcaagtgatccacctgcctgtgcctcccaaagtgtagagattacaggcatgagccaccatacccagcctcaaattgatcttatatttaactaattatacatgtgtaataatgataaaaatgagaggaggcagaagagaagacagtaattactattttgggatatgctgtgcctggccctttgctaaatgctgttacatataatatctcatttaatcttcctagcaaatacatttggtagctactatatttattatcatttttcagtcacaaaagatgaaattgagagatattatgtaatttgttaaagggcatagagaagaaagtgacaaaccagagatttaaaattatgtcagtctgaattcaaagcatcccattatactatctcccagatgcaaaaatctataagcatgaatactacttcagaatttacttttagcataagctttacatttaagaaatgttctaattttttgttttatattctttgtcacatataatttagcctctttaaactgttctataaatttagataattttctataatcagaaaacaggctaccacctatatacaaaaataaatggtatgccatgttgatcctagaacattttctagggtcaagagagtagtaaagctactgtttaaaataaaatgktttagttaatatgtatgttcatgtgtttttatctaaacaatcaagaaatgatgatgaagagataacatgtttgaaaaaaccctgaaaattttttaaacataaatgctgtagccaaatgaaaaaaaagttatcatgtaactatgaaatacttaactacaatattgcactcccagcattattattgttgctacttaatggaataacaacagtaatagtatcttcttaaattcaaattcctaaatataaagctagaaacataataggtctagtgcatctttactacaggacacttttttttttttaccttatacattgatagtgcaatgtatgtgataaatgcattggtaatgcaaatatataattattattatgtgctattcaaattttcatcaaaaatagataaatactttgactttaatcaaaattcttaatgatagtgtgaacatttttaaatttgtgttctccaaagctttgttaaataatttatcagattagagcaaaagtaattgtagtttttgccattacttttaatgacaaaattgacttgctaagaaaaagaataactctttcttcttttaattaagtatagtgcttattaggaacttaaagtggatccttcttttatattgtggagatcaggtatgctaatagaagacagagaaagccctttgacaggaaataaaatcctgaatattttatagataatcagcagtactgcaagggcttctgctgtcttttatcaatctgactttgtttgggcgctgagatctgctggtaggtgaactagagtaggaggttaccatcatagaatatactgtacatactagttcaagtttaaacatctttggtttcaacaaagggtaggcaatcattgcttaaaatagatgtattaacattttatttttacttatgatgtaggggtcggcaggaaatgcattgggactacatttgaagacttacttagctacacacacatagacacatacacacccatgagatagtcatctatattcagatcttctttgttacgaataagtgaattatttcctttatttcaaaattattgcactaatatgaattattatttaattcttcgttgccaataataatatactttgcttttctttttcagggtttaaacttgaaaagactagagacagtacaaggagggagagaggtaagaatgtttaaagaagaggggtgggaaaaagaggaaacatggctatggtgttgcagtgatgtggtgatggtgattgacgataattacgttgataatggaaatggagatgcattgaagagaatgttgtctgcatatggctctgttcattctgccaaagcatattttacatgtttatgtaaatgtgttatttgtgcttgttcctctgaagctaaagaaaatgttgtttctctgattaggcaagcattgtttctgttataatggatttctgtagcagcaggtcctttcacagggggcagaaacattacaatgcaatttttaaaactgacttactgagaagttaacaaaattctaacaatgcaaatattttatgacatttgggattcctcattttcctgtcaaaggcttttggcatatgctactaggttggtatgcattattagagagtatgaagttgctctggtaaagctagtaattttaaaactaactgaatgtgaagacttaacatcacttaattttttttccctgctaaatgtataaatgctgtacttaactctgtgattcaggttgctgggagttgtgggaagggtggaatatttaattcagtaaatcaaaacattctaactgcacaaaaaaaatcatttttgatgatacttatattgcaatttttgtacaaaagtgaaggtattttgttctatacaaatgaggaaaaaaatcttactgtcctctccatttgtagcttcctttctgtataaacagatttcttccctatagtggtgcttgccagctttcctttatgttttaattccagttgcatgattttagtatttgacattttagttcctagtgaatttgtcatttaaggtctctttccattttctcagatattttccatccagaaaaatctatttttatttaggaacacataaagttggttcacattgatggaagagctagatgaagtgaaacatagataaatctttagatatttttcatgttgtaggagagcaagatgataagaatatggtcatcagtatgactggggaaaaaaggcacttcataaggaagatctcagaaccttttacagctttgtgagaatgactgctttcattcagatgtaaccaaaatggatctacttatagaaagaactaaactgatcacctcctaaagtgaaagttttcatccgagcagtactgctacaatttatttctgctgatttagtgcctttagggacatactaagtggagttactcggcttctccttgctgcttcctggtctaatagcaactttgtgtcaaaagaaggaaaactgaaatctatatatccgtacgatggcattgctaaatggtgccaaattctgcatttgttttactaagatttttatagtttttaatgttatttttaaatgcataatgattgggttttattgaaagagtggctcttaaatcatattgcttatttttctaacgtcctttgattttatttttattataagtgtacttataagtaaggaacatggtaaaatgtgtttaaattaattttagaagtatattgttctcaaaactattttgtgatttctctgaaggtcaaaattgtaataatttacaatttaatgtatacatctccatagaagggacaacactgattttggccttctccctcagggtagtggaataattgtaaaaagctaagatcatcaaattaaccataatccagtaatgtcttctccacttgacatctctaattcatgaccagaaagtaaatgtcaactattaaaattcaaaacaactacttaacttccacttagggcagcactgggttacttaagcatatttctattcaatgtaactacttaccttaactttccctgtgactaagaggcctagtatgttctaagataagaaacttcagggaggtataagacaattaggtgaagtatgttgtaaaaactgttcttttcaagtctcaatggtagatgacctgtaaacaaagagtacaattactatgttaaggaccttgtgatctcacttgcttaagaaatgggacgtgtatgtatctaatttccatttgttatgttctaggatgtgtgtgcataacaagatgtacaatgtaattctgattatgttaaattgaaatgtgagggtttagaaaactcttactccaaatgatttcttagaatttctcattgtaatgctattatgattgataaatgacaataattgtttattatgatgaattaatttcttagttcaaatgacagctattccccataggtgttgatggatgcaatatcaagggcttattaccaaatatttataagaagatttaagaagtgtcatttaaaatgttctatttacttattgaagtaatgaaaacagagtattcatagaaaatgaagtagacagtaatatgctatttagctaagtggtaaataccattaaaaaacgaattgccagacaggaaggctagatttgaaactatatgctgtataaaaatataagttaaggagaagtgattaaaatgtaaattacttttctgaaggaaatagagataggtaacacctaaattgctaaattgtgaaatatacaaaaatagttattagctgtatgaaataaccccatttatattggtatttttacatttttatacgtgcatattgtgtatacaatttgagggggctgattataatagataataaaaagcttgtttaaaaagggagattagtagaatgctatacaaaagtgtgattgtttaacagatatttctaactgattataaacaattttcttgcatccagtgggattttgcaactcatagaaaaacctcagtgaaattcactgggtaagacacatagataagtcattttttttttcattaagtgtggataatactaagttactgtaatttttcttaaaagactttaaaatacctttgttattttaggtagtttttttgttttccaaaggccagtttttgtttaagtattaaagcttctgtgtgtgcctgtagcaggacgagccatggacaaaaccccacagacaccgaggtagtgaaggaagtagcttttaatcagctgaaagcatcagcagactagcatcctaaaatccgagcttgttgagtgcacaatttctgtcccttttgagggctcataacactaaagattttacatgaaagggccgtgattgattgaacaatctaggcggtatgtgacaggggctgcaagcaccagcaatcagagtgaaacagaacagaatgagaagcttcagagtgtccttccatacaatgtctggaatctgtggataatatcggttgctaggtcatgggttgaattttaactatcaggctaaggtcaggcaggcccaggcctggttttgggtctggtgcctggctctgggctgcctgcctttggtttcacttccttgtttcttcttaaagcaggtactgaatataaaacaatataaaacaatatggggggatctctttctctcttctttcatttcccacctttgagactctcactcattttattagtgggaattctcactttcattttcactacttatgtcttcccgtgcaatagattgatagtgattcatataatatacttgtgctgaagcattctggtgaactaaggtaatgatgaagctttttatcatttgaagaagtacaggtagcaaacaagggagtagtaagcaggttcctattactattataactcctatgataagagttttaaatcctcctattgctgggaaccaatttccaaacatggccccaggatcaaatccgtgccacacttgcatgggtacatgtgccagttttgttatatctttaaatatgtcttcaactacttgcccttgatcatctatgtggaaacagaaattagtaaggttaaattttccacaaactcctccttcagctgctagcaagtagttcagaactagtctattttggtagatagtattccttatctgagtctcttgctgggcaagaacagtcaagacttgacaggttttattagtaataatttctaaaacagcttgcaaccgtatgattcagttgagcatgaagatgggggtccgatatccccatgagccatcttgtgcccaagtggtgggtccacagtattgtataattctttcagggggccattcatcatctttccagttacctatggctatgcttcatttttcgcgggaagcatagacagggaatcctaggagtttgtctgtttttatgggcagtaggaagaaaggtggtgtaatagtgccaattacacagctacctgtccactgatcaggtggcttagcataggctctatgtccacatatccagtataacctgctgggggcaatccagtcctggcggaattctgggtgggctcaaacagtctgcaattttggaaatttactgaatggatttctttctgtgtaattggaactccaccatgtaactgtttttgtggtaccattatacagtttttgtccaagacacctaagccttactacaggatgagtgaattcttttccttctctagctatgcaatattgtccaataattgaggcttttagaacccagaaattgtcagggtggttcttttgggctgggaattcatcaggaactgggtctgcaggaactaattcttgggcttcccatggccactgatctcctgttacagttcctccacaaacataccattaagtgacttagacactgagctacatgctcggctaattgcaaaaacaaatttctagtttttcctggaatttcaggtactggcacatttagttcatcatagaaagtctgaaatactggctctggagagcattttcgaatctctccttttattaaaatatttacctcagggtctagtccttttccatcaatgcctggagatacgtactctccttttctccattttgggtccaaggggtttgtgattactaattcttaaaggttgcagcttccactcatgcaggaggggcttcctttccctttttggagccaaacaggatcttcttcatccttttcccaagtagcccaaatgacacatgaccagtacccacatttttttccacacaatcctacagatgtacttattttcggtcatgtatcttttttcccaattaaaagagccacatcctgctcctagcttatttctattaatgacagcacaagcgtcaaattataagattatgcgtttgggcacccctttttcttctgttctggctaatactttacttgtatcatttatgagtcctcactagtcttcagtccttaatctgatttcaaaaactatggaaatgggaggttcagaggggtcatagcacacgtcgggctggtcacttcctggattacagactttgtactgagtgttattatacaaacatgttccttttggaattactaggcattcataataactatagaacaaaaaaaattgtcttaacgtgttgtcctacctcagtgacctgatatatgcactgaaagcagtcctctgtgtgggaagaagcagtggaagcttttaccacacaagtccatgttataaggaaaataagtcccacgactattttcctcatgcttcagccatgcgtagaccagtcagcttccgggtgtgactggagcagggcttgtcgtcctcctcagggttactttgcagggattgtctaggcttggtttggcctcccaggttccagtggctgcgggctttatgtggctgtggtgaatccaggctggaattccttctaccttcacagctgtgggagtggtcaggataacggtcttgggtcccttccactgtggccgtaagggagctacatttcagtccttgatccacacacggtcacctggagaaaaagggtgaactggggagaataagctgactgagcacctctcatttacccaagttgagattgtctgggtaattttccccaaggcctgtaactgtctctgcaattcaatttcatccaactcttggggagt
